(19) United States
(12) Patent Application Publication
(10) Pub. No.: US 2023/0321255 A1
(43) Pub. Date: Oct. 12, 2023

(54) Modulators of PCSK9 Expression

(71) Applicant: IONIS PHARMACEUTICALS, INC, Carlsbad, CA (US)

(72) Inventors: Eric E. SWAYZE, Encinitas, CA (US); Susan M. FREIER, San Diego, CA (US); Huynh-Hoa BUI, San Diego, CA (US)

(21) Appl. No.: 18/171,539

(22) Filed: Feb. 20, 2023

Related U.S. Application Data
(63) Continuation of application No. 16/953,704, filed on Nov. 20, 2020, now Pat. No. 11,633,483.
Application No. 16/953,704 is a continuation of application No. 16/671,630, filed on Nov. 1, 2019, now Pat. No. 11,000,595.
Application No. 16/671,630 is a division of application No. 15/933,739, filed on Mar. 23, 2018, now Pat. No. 10,517,953.
(60) Provisional application No. 62/476,051, filed on Mar. 24, 2017.

(51) Int. Cl. A61K 47/54; A61K 31/7125; A61K 31/712; A61K 9/00; A61K 47/68; A61P 3/06; A61K 31/7115; C12N 15/113

(52) U.S. Cl. CPC A61K 47/549; A61K 31/7125; A61K 31/712; A61K 9/0019; A61K 47/6807; A61P 3/06; A61K 31/7115; C12N 15/1137; C12N 2310/11; C12N 2310/341; C12Y 304/21061; C12N 2310/315; C12N 2310/3341; C12N 2310/3231

(57) ABSTRACT

The present embodiments provide methods, compounds, and compositions useful for inhibiting PCSK9 expression, which may be useful for treating, preventing, or ameliorating a disease associated with PCSK9.

### SEQUENCE LISTING

[0001] The present application is being filed along with a Sequence Listing in electronic format. The Sequence Listing is provided as a file entitled 200615 SequenceListing.xml, created Feb. 2, 2023, which is 2,018 kb in size. The information in the electronic format of the sequence listing is incorporated herein by reference in its entirety.

### FIELD

[0002] The present embodiments provide methods, compounds, and compositions useful for inhibiting proprotein convertase subtilisin/kexin type 9 (PCSK9) expression, and in certain instances, reducing the amount of PCSK9 protein in a cell or animal, which can be useful for treating, preventing, or ameliorating a disease associated with PCSK9.

### BACKGROUND

[0003] Proprotein convertase subtilisin/kexin type 9 (PCSK9) is an enzyme with an important role in lipoprotein metabolism. Rare gain-of-function mutations in PCSK9 lead to a high LDL-C level and premature coronary heart disease, whereas loss-of-function variants lead to a low LDL-C level and a reduced incidence of coronary heart disease (Zhao et al., Am. J. Hum. Genet. 2006, 79: 514-523; Horton et al., J. Lipid Res. 2009, 50: Suppl: S172-S177). Therefore, PCSK9 is a well-validated target for LDL-choleserol-lowering therapy (Hooper et al., Expert Opin. Biol. Ther. 2013, 13: 429-435).

[0004] Antibodies for blocking PCSK9, Alirocumab and Evolocumab, have been demonstrated to reduce circulating PCSK9 levels and lower LDL-cholesterol levels but have a short duration of action, necessitating frequent subcutaneous injections (Zhang et al., BMC Med. 2015, 13: 123; Navarese et al., Ann. Intern. Med. 2015, 163: 40-51).

[0005] It is an object herein to provide compounds, methods, and pharmaceutical compositions for the improved treatment of diseases such as cardiovascular diseases, dyslipidemias, mixed dyslipidemias, and hypercholesterolemia.

### SUMMARY

[0006] Provided herein are compounds and methods for reducing the amount or activity of PCSK9 mRNA, and in certain embodiments, reducing the amount of PCSK9 protein in a cell or animal. In certain embodiments, the animal has a cardiovascular disease. In certain embodiments, the disease is dyslipidemia. In certain embodiments, the disease is mixed dyslipidemia. In certain embodiments, the disease is hypercholesterolemia. Certain compounds provided herein are directed to compounds and compositions that reduce LDL-cholesterol in an animal.

[0007] Certain embodiments provided herein are directed to potent and tolerable compounds and compositions useful for inhibiting PCSK9 expression, which can be useful for treating, preventing, ameliorating, or slowing progression of a cardiovascular disease. Certain embodiments provided herein are directed to compounds and compositions that are more potent or have greater therapeutic value than compounds publicly disclosed.

### DETAILED DESCRIPTION

[0008] It is to be understood that both the foregoing general description and the following detailed description are exemplary and explanatory only and are not restrictive of the embodiments, as claimed. Herein, the use of the singular includes the plural unless specifically stated otherwise. As used herein, the use of “or” means “and/or” unless stated otherwise. Furthermore, the use of the term “including” as well as other forms, such as “includes” and “included”, is not limiting.

[0009] The section headings used herein are for organizational purposes only and are not to be construed as limiting the subject matter described. All documents, or portions of documents, cited in this application, including, but not limited to, patents, patent applications, articles, books, treatises, and GenBank and NCBI reference sequence records are hereby expressly incorporated by reference for the portions of the document discussed herein, as well as in their entirety.

[0010] It is understood that the sequence set forth in each SEQ ID NO in the examples contained herein is independent of any modification to a sugar moiety, an internucleoside linkage, or a nucleobase. As such, compounds defined by a SEQ ID NO may comprise, independently, one or more modifications to a sugar moiety, an internucleoside linkage, or a nucleobase. Compounds described by ISIS number indicate a combination of nucleobase sequence, chemical modification, and motif.

### Definitions

[0011] Unless otherwise indicated, the following terms have the following meanings:

[0012] “2′-deoxynucleoside” means a nucleoside comprising 2′-H(H) furanosyl sugar moiety, as found in naturally occurring deoxyribonucleic acids (DNA). In certain embodiments, a 2′-deoxynucleoside may comprise a modified nucleobase or may comprise an RNA nucleobase (uracil).

[0013] “2′-O-methoxyethyl” (also 2′-MOE and 2′-O(CH₂)₂—OCH₃) refers to an O-methoxy-ethyl modification at the 2′ position of a furanosyl ring. A 2′-O-methoxyethyl modified sugar is a modified sugar.

[0014] “2′-MOE nucleoside” (also 2′-O-methoxyethyl nucleoside) means a nucleoside comprising a 2′-MOE modified sugar moiety.

[0015] “2′-substituted nucleoside” or “2-modified nucleoside” means a nucleoside comprising a 2′-substituted or 2′-modified sugar moiety. As used herein, “2′-substituted” or “2-modified” in reference to a sugar moiety means a sugar moiety comprising at least one 2′-substituent group other than H or OH.

[0016] “3′ target site” refers to the nucleotide of a target nucleic acid which is complementary to the 3′-most nucleotide of a particular compound.

[0017] “5′ target site” refers to the nucleotide of a target nucleic acid which is complementary to the 5′-most nucleotide of a particular compound.

[0018] “5-methylcytosine” means a cytosine with a methyl group attached to the 5 position.

[0019] “About” means within +10% of a value. For example, if it is stated, “the compounds affected about 70% inhibition of PCSK9”, it is implied that PCSK9 levels are inhibited within a range of 60% and 80%.

[0020] “Administration” or “administering” refers to routes of introducing a compound or composition provided herein to an individual to perform its intended function. An example of a route of administration that can be used includes, but is not limited to parenteral administration, such as subcutaneous, intravenous, or intramuscular injection or infusion.

[0021] “Amelioration” refers to an improvement or lessening of at least one indicator, sign, or symptom of an associated disease, disorder, or condition. In certain embodiments, amelioration includes a delay or slowing in the progression or severity of one or more indicators of a condition or disease. The progression or severity of indicators may be determined by subjective or objective measures, which are known to those skilled in the art.

[0022] “Animal” refers to a human or non-human animal, including, but not limited to, mice, rats, rabbits, dogs, cats, pigs, and non-human primates, including, but not limited to, monkeys and chimpanzees.

[0023] “Antisense activity” means any detectable and/or measurable activity attributable to the hybridization of an antisense compound to its target nucleic acid. In certain embodiments, antisense activity is a decrease in the amount or expression of a target nucleic acid or protein encoded by such target nucleic acid compared to target nucleic acid levels or target protein levels in the absence of the antisense compound to the target.

[0024] “Antisense compound” means a compound comprising an oligonucleotide and optionally one or more additional features, such as a conjugate group or terminal group. Examples of antisense compounds include single-stranded and double-stranded compounds, such as, oligonucleotides, ribozymes, siRNAs, shRNAs, ssRNAs, and occupancy-based compounds.

[0025] “Antisense inhibition” means reduction of target nucleic acid levels in the presence of an antisense compound complementary to a target nucleic acid compared to target nucleic acid levels in the absence of the antisense compound.

[0026] “Antisense mechanisms” are all those mechanisms involving hybridization of a compound with target nucleic acid, wherein the outcome or effect of the hybridization is either target degradation or target occupancy with concomitant stalling of the cellular machinery involving, for example, transcription or splicing.

[0027] “Antisense oligonucleotide” means an oligonucleotide having a nucleobase sequence that is complementary to a target nucleic acid or region or segment thereof. In certain embodiments, an antisense oligonucleotide is specifically hybridizable to a target nucleic acid or region or segment thereof.

[0028] “Bicyclic nucleoside” or “BNA” means a nucleoside comprising a bicyclic sugar moiety. “Bicyclic sugar” or “bicyclic sugar moiety” means a modified sugar moiety comprising two rings, wherein the second ring is formed via a bridge connecting two of the atoms in the first ring thereby forming a bicyclic structure. In certain embodiments, the first ring of the bicyclic sugar moiety is a furanosyl moiety. In certain embodiments, the bicyclic sugar moiety does not comprise a furanosyl moiety.

[0029] “Branching group” means a group of atoms having at least 3 positions that are capable of forming covalent linkages to at least 3 groups. In certain embodiments, a branching group provides a plurality of reactive sites for connecting tethered ligands to an oligonucleotide via a conjugate linker and/or a cleavable moiety.

[0030] “Cell-targeting moiety” means a conjugate group or portion of a conjugate group that is capable of binding to a particular cell type or particular cell types.

[0031] “cEt” or “constrained ethyl” means a bicyclic furanosyl sugar moiety comprising a bridge connecting the 4′-carbon and the 2′-carbon, wherein the bridge has the formula: 4′-CH(CH₃)—O-2′.

[0032] “cEt nucleoside” means a nucleoside comprising a cEt modified sugar moiety.

[0033] “Chemical modification” in a compound describes the substitutions or changes through chemical reaction, of any of the units in the compound relative to the original state of such unit. “Modified nucleoside” means a nucleoside having, independently, a modified sugar moiety and/or modified nucleobase. “Modified oligonucleotide” means an oligonucleotide comprising at least one modified internucleoside linkage, a modified sugar, and/or a modified nucleobase.

[0034] “Chemically distinct region” refers to a region of a compound that is in some way chemically different than another region of the same compound. For example, a region having 2′-O-methoxyethyl nucleotides is chemically distinct from a region having nucleotides without 2′-O-methoxyethyl modifications.

[0035] “Chimeric antisense compounds” means antisense compounds that have at least 2 chemically distinct regions, each position having a plurality of subunits.

[0036] “Cleavable bond” means any chemical bond capable of being split. In certain embodiments, a cleavable bond is selected from among: an amide, a polyamide, an ester, an ether, one or both esters of a phosphodiester, a phosphate ester, a carbamate, a di-sulfide, or a peptide.

[0037] “Cleavable moiety” means a bond or group of atoms that is cleaved under physiological conditions, for example, inside a cell, an animal, or a human.

[0038] “Complementary” in reference to an oligonucleotide means the nucleobase sequence of such oligonucleotide or one or more regions thereof matches the nucleobase sequence of another oligonucleotide or nucleic acid or one or more regions thereof when the two nucleobase sequences are aligned in opposing directions. Nucleobase matches or complementary nucleobases, as described herein, are limited to the following pairs: adenine (A) and thymine (T), adenine (A) and uracil (U), cytosine (C) and guanine (G), and 5-methyl cytosine (^{m}C) and guanine (G) unless otherwise specified. Complementary oligonucleotides and/or nucleic acids need not have nucleobase complementarity at each nucleoside and may include one or more nucleobase mismatches. By contrast, “fully complementary” or “100% complementary” in reference to oligonucleotides means that such oligonucleotides have nucleobase matches at each nucleoside without any nucleobase mismatches.

[0039] “Conjugate group” means a group of atoms that is attached to an oligonucleotide. Conjugate groups include a conjugate moiety and a conjugate linker that attaches the conjugate moiety to the oligonucleotide.

[0040] “Conjugate linker” means a group of atoms comprising at least one bond that connects a conjugate moiety to an oligonucleotide.

[0041] “Conjugate moiety” means a group of atoms that is attached to an oligonucleotide via a conjugate linker.

[0042] “Contiguous” in the context of an oligonucleotide refers to nucleosides, nucleobases, sugar moieties, or internucleoside linkages that are immediately adjacent to each other. For example, “contiguous nucleobases” means nucleobases that are immediately adjacent to each other in a sequence.

[0043] “Designing” or “Designed to” refer to the process of designing a compound that specifically hybridizes with a selected nucleic acid molecule.

[0044] “Differently modified” means chemical modifications or chemical substituents that are different from one another, including absence of modifications. Thus, for example, a MOE nucleoside and an unmodified DNA nucleoside are “differently modified,” even though the DNA nucleoside is unmodified. Likewise, DNA and RNA are “differently modified,” even though both are naturally-occurring unmodified nucleosides.

[0045] Nucleosides that are the same but for comprising different nucleobases are not differently modified. For example, a nucleoside comprising a 2′-OMe modified sugar and an unmodified adenine nucleobase and a nucleoside comprising a 2′-OMe modified sugar and an unmodified thymine nucleobase are not differently modified.

[0046] “Double-stranded antisense compound” means an antisense compound comprising two oligomeric compounds that are complementary to each other and form a duplex, and wherein one of the two said oligomeric compounds comprises an oligonucleotide.

[0047] “Effective amount” means the amount of compound sufficient to effectuate a desired physiological outcome in an individual in need of the compound. The effective amount may vary among individuals depending on the health and physical condition of the individual to be treated, the taxonomic group of the individuals to be treated, the formulation of the composition, assessment of the individual's medical condition, and other relevant factors.

[0048] “Efficacy” means the ability to produce a desired effect.

[0049] “Expression” includes all the functions by which a gene's coded information is converted into structures present and operating in a cell. Such structures include, but are not limited to, the products of transcription and translation.

[0050] “Gapmer” means an oligonucleotide comprising an internal region having a plurality of nucleosides that support RNase H cleavage positioned between external regions having one or more nucleosides, wherein the nucleosides comprising the internal region are chemically distinct from the nucleoside or nucleosides comprising the external regions. The internal region may be referred to as the “gap” and the external regions may be referred to as the “wings.” “Hybridization” means the annealing of oligonucleotides and/or nucleic acids. While not limited to a particular mechanism, the most common mechanism of hybridization involves hydrogen bonding, which may be Watson-Crick, Hoogsteen or reversed Hoogsteen hydrogen bonding, between complementary nucleobases.

[0051] In certain embodiments, complementary nucleic acid molecules include, but are not limited to, an antisense compound and a nucleic acid target. In certain embodiments, complementary nucleic acid molecules include, but are not limited to, an oligonucleotide and a nucleic acid target.

[0052] “Immediately adjacent” means there are no intervening elements between the immediately adjacent elements of the same kind (e.g. no intervening nucleobases between the immediately adjacent nucleobases).

[0053] “Individual” means a human or non-human animal selected for treatment or therapy.

[0054] “Inhibiting the expression or activity” refers to a reduction or blockade of the expression or activity relative to the expression of activity in an untreated or control sample and does not necessarily indicate a total elimination of expression or activity.

[0055] “Internucleoside linkage” means a group or bond that forms a covalent linkage between adjacent nucleosides in an oligonucleotide. “Modified internucleoside linkage” means any internucleoside linkage other than a naturally occurring, phosphate internucleoside linkage. Non-phosphate linkages are referred to herein as modified internucleoside linkages.

[0056] “Lengthened oligonucleotides” are those that have one or more additional nucleosides relative to an oligonucleotide disclosed herein, e.g. a parent oligonucleotide.

[0057] “Linked nucleosides” means adjacent nucleosides linked together by an internucleoside linkage.

[0058] “Linker-nucleoside” means a nucleoside that links an oligonucleotide to a conjugate moiety. Linker-nucleosides are located within the conjugate linker of a compound. Linker-nucleosides are not considered part of the oligonucleotide portion of a compound even if they are contiguous with the oligonucleotide.

[0059] “Mismatch” or “non-complementary” means a nucleobase of a first oligonucleotide that is not complementary to the corresponding nucleobase of a second oligonucleotide or target nucleic acid when the first and second oligonucleotides are aligned. For example, nucleobases including but not limited to a universal nucleobase, inosine, and hypoxanthine, are capable of hybridizing with at least one nucleobase but are still mismatched or non-complementary with respect to nucleobase to which it hybridized. As another example, a nucleobase of a first oligonucleotide that is not capable of hybridizing to the corresponding nucleobase of a second oligonucleotide or target nucleic acid when the first and second oligonucleotides are aligned is a mismatch or non-complementary nucleobase.

[0060] “Modulating” refers to changing or adjusting a feature in a cell, tissue, organ or organism. For example, modulating PCSK9 RNA can mean to increase or decrease the level of PCSK9 RNA and/or PCSK9 protein in a cell, tissue, organ or organism. A “modulator” effects the change in the cell, tissue, organ or organism. For example, a PCSK9 compound can be a modulator that decreases the amount of PCSK9 RNA and/or PCSK9 protein in a cell, tissue, organ or organism.

[0061] “MOE” means methoxyethyl.

[0062] “Monomer” refers to a single unit of an oligomer. Monomers include, but are not limited to, nucleosides and nucleotides.

[0063] “Motif” means the pattern of unmodified and/or modified sugar moieties, nucleobases, and/or internucleoside linkages, in an oligonucleotide.

[0064] “Natural” or “naturally occurring” means found in nature.

[0065] “Non-bicyclic modified sugar” or “non-bicyclic modified sugar moiety” means a modified sugar moiety that comprises a modification, such as a substituent, that does not form a bridge between two atoms of the sugar to form a second ring.

[0066] “Nucleic acid” refers to molecules composed of monomeric nucleotides. A nucleic acid includes, but is not limited to, ribonucleic acids (RNA), deoxyribonucleic acids (DNA), single-stranded nucleic acids, and double-stranded nucleic acids.

[0067] “Nucleobase” means a heterocyclic moiety capable of pairing with a base of another nucleic acid. As used herein a “naturally occurring nucleobase” is adenine (A), thymine (T), cytosine (C), uracil (U), and guanine (G). A “modified nucleobase” is a naturally occurring nucleobase that is chemically modified. A “universal base” or “universal nucleobase” is a nucleobase other than a naturally occurring nucleobase and modified nucleobase, and is capable of pairing with any nucleobase.

[0068] “Nucleobase sequence” means the order of contiguous nucleobases in a nucleic acid or oligonucleotide independent of any sugar or internucleoside linkage.

[0069] “Nucleoside” means a compound comprising a nucleobase and a sugar moiety. The nucleobase and sugar moiety are each, independently, unmodified or modified. “Modified nucleoside” means a nucleoside comprising a modified nucleobase and/or a modified sugar moiety. Modified nucleosides include abasic nucleosides, which lack a nucleobase.

[0070] “Oligomeric compound” means a compound comprising a single oligonucleotide and optionally one or more additional features, such as a conjugate group or terminal group.

[0071] “Oligonucleotide” means a polymer of linked nucleosides each of which can be modified or unmodified, independent one from another. Unless otherwise indicated, oligonucleotides consist of 8-80 linked nucleosides. “Modified oligonucleotide” means an oligonucleotide, wherein at least one sugar, nucleobase, or internucleoside linkage is modified. “Unmodified oligonucleotide” means an oligonucleotide that does not comprise any sugar, nucleobase, or internucleoside modification.

[0072] “Parent oligonucleotide” means an oligonucleotide whose sequence is used as the basis of design for more oligonucleotides of similar sequence but with different lengths, motifs, and/or chemistries. The newly designed oligonucleotides may have the same or overlapping sequence as the parent oligonucleotide.

[0073] “Parenteral administration” means administration through injection or infusion. Parenteral administration includes subcutaneous administration, intravenous administration, intramuscular administration, intraarterial administration, intraperitoneal administration, or intracranial administration, e.g. intrathecal or intracerebroventricular administration.

[0074] “Pharmaceutically acceptable carrier or diluent” means any substance suitable for use in administering to an individual. For example, a pharmaceutically acceptable carrier can be a sterile aqueous solution, such as PBS or water-for-injection.

[0075] “Pharmaceutically acceptable salts” means physiologically and pharmaceutically acceptable salts of compounds, such as oligomeric compounds or oligonucleotides, i.e., salts that retain the desired biological activity of the parent compound and do not impart undesired toxicological effects thereto.

[0076] “Pharmaceutical agent” means a compound that provides a therapeutic benefit when administered to an individual.

[0077] “Pharmaceutical composition” means a mixture of substances suitable for administering to an individual. For example, a pharmaceutical composition may comprise one or more compounds or salt thereof and a sterile aqueous solution.

[0078] “Phosphorothioate linkage” means a modified phosphate linkage in which one of the non-bridging oxygen atoms is replaced with a sulfur atom. A phosphorothioate internucleoside linkage is a modified internucleoside linkage.

[0079] “Phosphorus moiety” means a group of atoms comprising a phosphorus atom. In certain embodiments, a phosphorus moiety comprises a mono-, di-, or tri-phosphate, or phosphorothioate.

[0080] “Portion” means a defined number of contiguous (i.e., linked) nucleobases of a nucleic acid. In certain embodiments, a portion is a defined number of contiguous nucleobases of a target nucleic acid. In certain embodiments, a portion is a defined number of contiguous nucleobases of an oligomeric compound.

[0081] “Prevent” refers to delaying or forestalling the onset, development or progression of a disease, disorder, or condition for a period of time from minutes to indefinitely.

[0082] “Prodrug” means a compound in a form outside the body which, when administered to an individual, is metabolized to another form within the body or cells thereof. In certain embodiments, the metabolized form is the active, or more active, form of the compound (e.g., drug). Typically conversion of a prodrug within the body is facilitated by the action of an enzyme(s) (e.g., endogenous or viral enzyme) or chemical(s) present in cells or tissues, and/or by physiologic conditions.

[0083] “Reduce” means to bring down to a smaller extent, size, amount, or number.

[0084] “RefSeq No.” is a unique combination of letters and numbers assigned to a sequence to indicate the sequence is for a particular target transcript (e.g., target gene). Such sequence and information about the target gene (collectively, the gene record) can be found in a genetic sequence database. Genetic sequence_databases include the NCBI Reference Sequence database, GenBank, the European Nucleotide Archive, and the DNA Data Bank of Japan (the latter three forming the International Nucleotide Sequence Database Collaboration or INSDC).

[0085] “Region” is defined as a portion of the target nucleic acid having at least one identifiable structure, function, or characteristic.

[0086] “RNAi compound” means an antisense compound that acts, at least in part, through RISC or Ago2, but not through RNase H, to modulate a target nucleic acid and/or protein encoded by a target nucleic acid. RNAi compounds include, but are not limited to double-stranded siRNA, single-stranded RNA (ssRNA), and microRNA, including microRNA mimics.

[0087] “Segments” are defined as smaller or sub-portions of regions within a nucleic acid.

[0088] “Side effects” means physiological disease and/or conditions attributable to a treatment other than the desired effects. In certain embodiments, side effects include injection site reactions, liver function test abnormalities, renal function abnormalities, liver toxicity, renal toxicity, central nervous system abnormalities, myopathies, and malaise. For example, increased aminotransferase levels in serum may indicate liver toxicity or liver function abnormality. For example, increased bilirubin may indicate liver toxicity or liver function abnormality.

[0089] “Single-stranded” in reference to a compound means the compound has only one oligonucleotide. “Self-complementary” means an oligonucleotide that at least partially hybridizes to itself. A compound consisting of one oligonucleotide, wherein the oligonucleotide of the compound is self-complementary, is a single-stranded compound. A single-stranded compound may be capable of binding to a complementary compound to form a duplex.

[0090] “Sites” are defined as unique nucleobase positions within a target nucleic acid.

[0091] “Specifically hybridizable” refers to an oligonucleotide having a sufficient degree of complementarity between the oligonucleotide and a target nucleic acid to induce a desired effect, while exhibiting minimal or no effects on non-target nucleic acids. In certain embodiments, specific hybridization occurs under physiological conditions.

[0092] “Specifically inhibit” with reference to a target nucleic acid means to reduce or block expression of the target nucleic acid while exhibiting fewer, minimal, or no effects on non-target nucleic acids. Reduction does not necessarily indicate a total elimination of the target nucleic acid's expression.

[0093] “Standard cell assay” means assay(s) described in the Examples and reasonable variations thereof.

[0094] “Standard in vivo experiment” means the procedure(s) described in the Example(s) and reasonable variations thereof.

[0095] “Sugar moiety” means an unmodified sugar moiety or a modified sugar moiety. “Unmodified sugar moiety” or “unmodified sugar” means a 2′-OH(H) furanosyl moiety, as found in RNA (an “unmodified RNA sugar moiety”), or a 2′-H(H) moiety, as found in DNA (an “unmodified DNA sugar moiety”). Unmodified sugar moieties have one hydrogen at each of the 1′, 3′, and 4′ positions, an oxygen at the 3′ position, and two hydrogens at the 5′ position. “Modified sugar moiety” or “modified sugar” means a modified furanosyl sugar moiety or a sugar surrogate. “Modified furanosyl sugar moiety” means a furanosyl sugar comprising a non-hydrogen substituent in place of at least one hydrogen of an unmodified sugar moiety. In certain embodiments, a modified furanosyl sugar moiety is a 2′-substituted sugar moiety. Such modified furanosyl sugar moieties include bicyclic sugars and non-bicyclic sugars.

[0096] “Sugar surrogate” means a modified sugar moiety having other than a furanosyl moiety that can link a nucleobase to another group, such as an internucleoside linkage, conjugate group, or terminal group in an oligonucleotide. Modified nucleosides comprising sugar surrogates can be incorporated into one or more positions within an oligonucleotide and such oligonucleotides are capable of hybridizing to complementary compounds or nucleic acids.

[0097] “PCSK9” means any nucleic acid or protein of PCSK9. “PCSK9 nucleic acid” means any nucleic acid encoding PCSK9. For example, in certain embodiments, a PCSK9 nucleic acid includes a DNA sequence encoding PCSK9, an RNA sequence transcribed from DNA encoding PCSK9 (including genomic DNA comprising introns and exons) and an mRNA sequence encoding PCSK9. “PCSK9 mRNA” means an mRNA encoding a PCSK9 protein. The target may be referred to in either upper or lower case.

[0098] “PCSK9 specific inhibitor” refers to any agent capable of specifically inhibiting PCSK9 RNA and/or PCSK9 protein expression or activity at the molecular level. For example, PCSK9 specific inhibitors include nucleic acids (including antisense compounds), peptides, antibodies, small molecules, and other agents capable of inhibiting the expression of PCSK9 RNA and/or PCSK9 protein.

[0099] “Target gene” refers to a gene encoding a target.

[0100] “Targeting” means the specific hybridization of a compound to a target nucleic acid in order to induce a desired effect.

[0101] “Target nucleic acid,” “target RNA,” “target RNA transcript” and “nucleic acid target” all mean a nucleic acid capable of being targeted by compounds described herein.

[0102] “Target region” means a portion of a target nucleic acid to which one or more compounds is targeted.

[0103] “Target segment” means the sequence of nucleotides of a target nucleic acid to which a compound is targeted. “5′ target site” refers to the 5′-most nucleotide of a target segment. “3′ target site” refers to the 3′-most nucleotide of a target segment.

[0104] “Terminal group” means a chemical group or group of atoms that is covalently linked to a terminus of an oligonucleotide.

[0105] “Therapeutically effective amount” means an amount of a compound, pharmaceutical agent, or composition that provides a therapeutic benefit to an individual.

[0106] “Treat” refers to administering a compound or pharmaceutical composition to an animal in order to effect an alteration or improvement of a disease, disorder, or condition in the animal.

### Certain Embodiments

[0107] Certain embodiments provide methods, compounds and compositions for inhibiting PCSK9 expression.

[0108] Certain embodiments provide compounds targeted to a PCSK9 nucleic acid. In certain embodiments, the PCSK9 nucleic acid has the sequence set forth in RefSeq or GENBANK Accession No. NM_174936.3 and GENBANK Accession No. NC_000001.11 truncated from nucleotides 55036001 to 55068000 (incorporated by reference, disclosed herein as SEQ ID NO: 1 and SEQ ID NO: 2, respectively). In certain embodiments, the compound is an antisense compound or oligomeric compound. In certain embodiments, the compound is single-stranded. In certain embodiments, the compound is double-stranded.

[0109] Certain embodiments provide a compound comprising a modified oligonucleotide 8 to 80 linked nucleosides in length and having a nucleobase sequence comprising at least 8 contiguous nucleobases of any of the nucleobase sequences of SEQ ID NOs: 3-1540. In certain embodiments, the compound is an antisense compound or oligomeric compound. In certain embodiments, the compound is single-stranded. In certain embodiments, the compound is double-stranded. In certain embodiments, the modified oligonucleotide is 10 to 30 linked nucleosides in length.

[0110] Certain embodiments provide a compound comprising a modified oligonucleotide 9 to 80 linked nucleosides in length and having a nucleobase sequence comprising at least 9 contiguous nucleobases of any of the nucleobase sequences of SEQ ID NOs: 3-1540. In certain embodiments, the compound is an antisense compound or oligomeric compound. In certain embodiments, the compound is single-stranded. In certain embodiments, the compound is double-stranded. In certain embodiments, the modified oligonucleotide is 10 to 30 linked nucleosides in length.

[0111] Certain embodiments provide a compound comprising a modified oligonucleotide 10 to 80 linked nucleosides in length and having a nucleobase sequence comprising at least 10 contiguous nucleobases of any of the nucleobase sequences of SEQ ID NOs: 3-1540. In certain embodiments, the compound is an antisense compound or oligomeric compound. In certain embodiments, the compound is single-stranded. In certain embodiments, the compound is double-stranded. In certain embodiments, the modified oligonucleotide is 10 to 30 linked nucleosides in length.

[0112] Certain embodiments provide a compound comprising a modified oligonucleotide 11 to 80 linked nucleosides in length and having a nucleobase sequence comprising at least 11 contiguous nucleobases of any of the nucleobase sequences of SEQ ID NOs: 3-1540. In certain embodiments, the compound is an antisense compound or oligomeric compound. In certain embodiments, the compound is single-stranded. In certain embodiments, the compound is double-stranded. In certain embodiments, the modified oligonucleotide is 11 to 30 linked nucleosides in length.

[0113] Certain embodiments provide a compound comprising a modified oligonucleotide 12 to 80 linked nucleosides in length and having a nucleobase sequence comprising at least 12 contiguous nucleobases of any of the nucleobase sequences of SEQ ID NOs: 3-1540. In certain embodiments, the compound is an antisense compound or oligomeric compound. In certain embodiments, the compound is single-stranded. In certain embodiments, the compound is double-stranded. In certain embodiments, the modified oligonucleotide is 12 to 30 linked nucleosides in length.

[0114] In certain embodiments, the compound comprises a modified oligonucleotide 30 linked nucleosides in length. In certain embodiments, the compound is an antisense compound or oligomeric compound.

[0115] Certain embodiments provide a compound comprising a modified oligonucleotide 14 to 80 linked nucleosides in length and having a nucleobase sequence comprising the nucleobase sequence of any one of SEQ ID NOs: 3-1540. In certain embodiments, the compound is an antisense compound or oligomeric compound. In certain embodiments, the compound is single-stranded. In certain embodiments, the compound is double-stranded. In certain embodiments, the modified oligonucleotide is 14 to 30 linked nucleosides in length.

[0116] Certain embodiments provide a compound comprising a modified oligonucleotide consisting of the nucleobase sequence of any one of SEQ ID NOs: 3-1540. In certain embodiments, the compound is an antisense compound or oligomeric compound. In certain embodiments, the compound is single-stranded. In certain embodiments, the compound is double-stranded.

[0117] Certain embodiments provide a compound comprising a modified oligonucleotide 8 to 80 linked nucleosides in length and complementary within nucleobases 6356-6371, 12843-12947, 12905-12948, 17681-17700, 19653-19673, 27626-27669, 27895-27949, and 28105-28136 of SEQ ID NO: 2, wherein said modified oligonucleotide is at least 85%, at least 90%, at least 95%, or 100% complementary to SEQ ID NO: 2. In certain embodiments, the compound is an antisense compound or oligomeric compound. In certain embodiments, the compound is single-stranded. In certain embodiments, the compound is double-stranded. In certain embodiments, the modified oligonucleotide is 10 to 30 linked nucleosides in length.

[0118] Certain embodiments provide a compound comprising a modified oligonucleotide 8 to 80 linked nucleosides in length and having a nucleobase sequence comprising a portion of at least 8 contiguous nucleobases complementary to an equal length portion of nucleobases 6356-6371, 12843-12947, 12905-12948, 17681-17700, 19653-19673, 27626-27669, 27895-27949, and 28105-28136 of SEQ ID NO: 2, wherein said modified oligonucleotide is at least 85%, at least 90%, at least 95%, or 100% complementary to SEQ ID NO: 2. In certain embodiments, the compound is an antisense compound or oligomeric compound. In certain embodiments, the compound is single-stranded. In certain embodiments, the compound is double-stranded. In certain embodiments, the modified oligonucleotide is 10 to 30 linked nucleosides in length.

[0119] In certain embodiments, compounds target a region of a PCSK9 nucleic acid. In certain embodiments, such compounds targeted to a region of a PCSK9 nucleic acid have a contiguous nucleobase portion that is complementary to an equal length nucleobase portion of the region. For example, the portion can be at least an 8, 9, 10, 11, 12, 13, 14, 15, 16, 17, 18, 19, or 20 contiguous nucleobase portion complementary to an equal length portion of a region recited herein. In certain embodiments, such compounds target the following nucleotide regions of SEQ ID NO: 2: 6356-6371, 12843-12947, 12905-12948, 17681-17700, 19653-19673, 27626-27669, 27895-27949, and 28105-28136. In certain embodiments, these compounds are antisense compounds, oligomeric compounds, or oligonucleotides.

[0120] In certain embodiments, a compound comprises a modified oligonucleotide 8 to 80 linked nucleosides in length and having at least an 8, 9, 10, 11, 12, 13, 14, 15, or 16 contiguous nucleobase portion complementary to an equal length portion within nucleotides 6356-6371, 12909-12924, 17685-17700, 19658-19673, 27643-27658, 27906-27921, 27916-27931, 27917-27932, and 28107-28122 of SEQ ID NO: 2. In certain embodiments, the modified oligonucleotide is 10 to 30 linked nucleosides in length.

[0121] In certain embodiments, a compound comprises a modified oligonucleotide 8 to 80 linked nucleosides in length and complementary within nucleotides 6356-6371, 12909-12924, 17685-17700, 19658-19673, 27643-27658, 27906-27921, 27916-27931, 27917-27932, and 28107-28122 of SEQ ID NO: 2. In certain embodiments, the modified oligonucleotide is 10 to 30 linked nucleosides in length.

[0122] In certain embodiments, a compound comprises a modified oligonucleotide 8 to 80 linked nucleosides in length and having a nucleobase sequence comprising at least an 8, 9, 10, 11, 12, 13, 14, 15, or 16 contiguous nucleobase portion any one of SEQ ID NOs: 1016, 1528, 763, 1071, 1147, 1149, 1016, 955, 1195, and 353. In certain embodiments, the modified oligonucleotide is 10 to 30 linked nucleosides in length.

[0123] In certain embodiments, a compound comprises a modified oligonucleotide 8 to 80 linked nucleosides in length and having a nucleobase sequence comprising any one of SEQ ID NOs: 1016, 1528, 763, 1071, 1147, 1149, 1016, 955, 1195, and 353. In certain embodiments, the modified oligonucleotide is 10 to 30 linked nucleosides in length.

[0124] In certain embodiments, a compound comprises a modified oligonucleotide having a nucleobase sequence consisting of any one of SEQ ID NOs: 1016, 1528, 763, 1071, 1147, 1149, 1016, 955, 1195, and 353.

[0125] In certain embodiments, compounds targeted to PCSK9 are ISIS 863568, ISIS 863579, ISIS 863581, ISIS 863582, ISIS 863587, ISIS 863633, ISIS 863655, ISIS 863670, and ISIS 863681. Out of over 1540 compounds that were screened as described in the Examples section below, ISIS 863568, ISIS 863579, ISIS 863581, ISIS 863582, ISIS 863587, ISIS 863633, ISIS 863655, ISIS 863670, and ISIS 863681 emerged as the top lead compounds. In particular, ISIS 863633 exhibited the best combination of properties in terms of potency and tolerability out of over 1540 compounds.

[0126] In certain embodiments, any of the foregoing modified oligonucleotides comprises at least one modified internucleoside linkage, at least one modified sugar, and/or at least one modified nucleobase.

[0127] In certain embodiments, any of the foregoing modified oligonucleotides comprises at least one modified sugar. In certain embodiments, at least one modified sugar comprises a 2′-O-methoxyethyl group. In certain embodiments, at least one modified sugar is a bicyclic sugar, such as a 4′-CH(CH3)-O-2′ group, a 4′-CH2-O-2′ group, or a 4′-(CH2)2-O-2′ group.

[0128] In certain embodiments, the modified oligonucleotide comprises at least one modified internucleoside linkage, such as a phosphorothioate internucleoside linkage.

[0129] In certain embodiments, any of the foregoing modified oligonucleotides comprises at least one modified nucleobase, such as 5-methylcytosine.

[0130] In certain embodiments, any of the foregoing modified oligonucleotides comprises:
[0131] a gap segment consisting of linked deoxynucleosides;
[0132] a 5′ wing segment consisting of linked nucleosides; and
[0133] a 3′ wing segment consisting of linked nucleosides;

[0134] wherein the gap segment is positioned between the 5′ wing segment and the 3′ wing segment and wherein each nucleoside of each wing segment comprises a modified sugar. In certain embodiments, the modified oligonucleotide is 14 to 80 linked nucleosides in length having a nucleobase sequence comprising the sequence recited in any one of SEQ ID NOs: 1016, 1528, 763, 1071, 1147, 1149, 1016, 955, 1195, and 353. In certain embodiments, the modified oligonucleotide is 10 to 30 linked nucleosides in length having a nucleobase sequence comprising the sequence recited in any one of SEQ ID NOs: 1016, 1528, 763, 1071, 1147, 1149, 1016, 955, 1195, and 353. In certain embodiments, the modified oligonucleotide is 14 linked nucleosides in length having a nucleobase sequence consisting of the sequence recited in any one of SEQ ID NOs: 1016, 1528, 763, 1071, 1147, 1149, 1016, 955, 1195, and 353.

[0135] In certain embodiments, a compound comprises or consists of a modified oligonucleotide 16-80 linked nucleobases in length having a nucleobase sequence comprising the sequence recited in any one of SEQ ID NOs: 1016, 1528, 763, 1071, 1147, 1149, 1016, 955, 1195, and 353, wherein the modified oligonucleotide comprises
[0136] a gap segment consisting of ten linked deoxynucleosides;
[0137] a 5′ wing segment consisting of three linked nucleosides; and
[0138] a 3′ wing segment consisting of three linked nucleosides;

[0139] wherein the gap segment is positioned between the 5′ wing segment and the 3′ wing segment, wherein each nucleoside of each wing segment comprises a cEt sugar; wherein each internucleoside linkage is a phosphorothioate linkage and wherein each cytosine is a 5-methylcytosine. In certain embodiments, the modified oligonucleotide consists of 16-30 linked nucleosides. In certain embodiments, the modified oligonucleotide consists of 16 linked nucleosides.

[0140] In certain embodiments, a compound comprises or consists of ISIS 863633 or salt thereof, having the following chemical structure:

[chemical structure]

[0141] In certain embodiments, a compound comprises or consists of ISIS 863633 or salt thereof, having the following chemical structure:

[chemical structure]

[0142] In certain embodiments, a compound comprises or consists of the sodium salt of ISIS 863633, having the following chemical structure:

[chemical structure]

[0143] In any of the foregoing embodiments, the compound or oligonucleotide can be at least 85%, at least 90%, at least 95%, at least 98%, at least 99%, or 100% complementary to a nucleic acid encoding PCSK9.

[0144] In any of the foregoing embodiments, the compound can be single-stranded. In certain embodiments, the compound comprises deoxyribonucleotides. In certain embodiments, the compound is double-stranded. In certain embodiments, the compound is double-stranded and comprises ribonucleotides. In any of the foregoing embodiments, the compound can be an antisense compound or oligomeric compound.

[0145] In any of the foregoing embodiments, the compound can be 8 to 80, 10 to 30, 12 to 50, 13 to 30, 13 to 50, 14 to 30, 14 to 50, 15 to 30, 15 to 50, 16 to 30, 16 to 50, 17 to 30, 17 to 50, 18 to 22, 18 to 24, 18 to 30, 18 to 50, 19 to 22, 19 to 30, 19 to 50, or 20 to 30 linked nucleosides in length. In certain embodiments, the compound comprises or consists of an oligonucleotide.

[0146] In certain embodiments, a compound comprises a modified oligonucleotide described herein and a conjugate group. In certain embodiments, the conjugate group is linked to the modified oligonucleotide at the 5′ end of the modified oligonucleotide. In certain embodiments, the conjugate group is linked to the modified oligonucleotide at the 3′ end of the modified oligonucleotide. In certain embodiments, the conjugate group comprises at least one N-Acetylgalactosamine (GalNAc), at least two N-Acetylgalactosamines (GalNAcs), or at least three N-Acetylgalactosamines (GalNAcs).

[0147] In certain embodiments, compounds or compositions provided herein comprise a pharmaceutically acceptable salt of the modified oligonucleotide. In certain embodiments, the salt is a sodium salt. In certain embodiments, the salt is a potassium salt.

[0148] In certain embodiments, the compounds or compositions as described herein are active by virtue of having at least one of an in vitro IC₅₀ of less than 5 μM, less than 4.5 μM, less than 4 μM, less than 3.5 μM, less than 3 μM, less than 2.5 μM, less than 2 μM, less than 1.5 μM, less than 1 μM, less than 0.9 μM, less than 0.8 μM, less than 0.7 μM, less than 0.6 μM, less than 0.5 μM, less than 0.4 μM, less than 0.3 μM, less than 0.2 μM, or less than 0.1 μM.

[0149] In certain embodiments, the compounds or compositions as described herein are highly tolerable as demonstrated by having at least one of an increase an alanine transaminase (ALT) or aspartate transaminase (AST) value of no more than 4 fold, 3 fold, or 2 fold over saline treated animals or an increase in liver, spleen, or kidney weight of no more than 30%, 20%, 15%, 12%, 10%, 5%, or 2% compared to control treated animals.

[0150] In certain embodiments, the compounds or compositions as described herein are highly tolerable as demonstrated by having no increase of ALT or AST over control treated animals. In certain embodiments, the compounds or compositions as described herein are highly tolerable as demonstrated by having no increase in liver, spleen, or kidney weight over control animals.

[0151] Certain embodiments provide a composition comprising the compound of any of the aforementioned embodiments or any pharmaceutically acceptable salt thereof and at least one of a pharmaceutically acceptable carrier or diluent. In certain embodiments, the composition has a viscosity less than about 40 centipoise (cP), less than about 30 centipose (cP), less than about 20 centipose (cP), less than about 15 centipose (cP), or less than about 10 centipose (cP). In certain embodiments, the composition having any of the aforementioned viscosities comprises a compound provided herein at a concentration of about 100 mg/mL, about 125 mg/mL, about 150 mg/mL, about 175 mg/mL, about 200 mg/mL, about 225 mg/mL, about 250 mg/mL, about 275 mg/mL, or about 300 mg/mL. In certain embodiments, the composition having any of the aforementioned viscosities and/or compound concentrations has a temperature of room temperature or about 20° C., about 21° C., about 22° C., about 23° C., about 24° C., about 25° C., about 26° C., about 27° C., about 28° C., about 29° C., or about 30° C.

### Certain Indications

[0152] Certain embodiments provided herein relate to methods of inhibiting PCSK9 expression, which can be useful for treating, preventing, or ameliorating a disease associated with PCSK9 in an individual, by administration of a compound that targets PCSK9. In certain embodiments, the compound can be a PCSK9 specific inhibitor. In certain embodiments, the compound can be an antisense compound, oligomeric compound, or oligonucleotide targeted to PCSK9.

[0153] Examples of diseases associated with PCSK9 treatable, preventable, and/or ameliorable with the methods provided herein include a cardiovascular disease, dyslipidemia, mixed dyslipidemia, hypercholesterolemia, a reduction in LDL cholesterol, and reduction in atherogenic apolipoprotein (a) [Lp(a)].

[0154] In certain embodiments, a method of treating, preventing, or ameliorating a disease associated with PCSK9 in an individual comprises administering to the individual a compound comprising a PCSK9 specific inhibitor, thereby treating, preventing, or ameliorating the disease. In certain embodiments, the individual is identified as having or at risk of having a disease associated with PCSK9. In certain embodiments, the disease is a cardiovascular disease. In certain embodiments, the compound comprises an antisense compound targeted to PCSK9. In certain embodiments, the compound comprises an oligonucleotide targeted to PCSK9. In certain embodiments, a compound comprises a modified oligonucleotide 8 to 80 linked nucleosides in length and having a nucleobase sequence comprising at least 8 contiguous nucleobases of any of the nucleobase sequences of SEQ ID NOs: 3-1540. In certain embodiments, a compound comprises a modified oligonucleotide 14 to 80 linked nucleosides in length and having a nucleobase sequence comprising the nucleobase sequence of any one of SEQ ID NOs: 3-1540. In certain embodiments, a compound comprises a modified oligonucleotide consisting of the nucleobase sequence of any one of SEQ ID NOs: 3-1540. In certain embodiments, a compound comprises a modified oligonucleotide 14 to 80 linked nucleosides in length having a nucleobase sequence comprising any one of SEQ ID NOs: 1016, 1528, 763, 1071, 1147, 1149, 1016, 955, 1195, and 353. In certain embodiments, a compound comprises a modified oligonucleotide having a nucleobase sequence consisting of any one of SEQ ID NOs: 1016, 1528, 763, 1071, 1147, 1149, 1016, 955, 1195, and 353. In any of the foregoing embodiments, the modified oligonucleotide can be 10 to 30 linked nucleosides in length. In certain embodiments, the compound is ISIS 863568, ISIS 863579, ISIS 863581, ISIS 863582, ISIS 863587, ISIS 863633, ISIS 863655, ISIS 863670, and ISIS 863681. In any of the foregoing embodiments, the compound can be single-stranded or double-stranded. In any of the foregoing embodiments, the compound can be an antisense compound or oligomeric compound. In certain embodiments, the compound is administered to the individual parenterally. In certain embodiments, administering the compound reduces LDL-cholesterol levels, reduces Lp(a) levels, induces LDL receptor (LDL-R) activity, and regulates LDL receptor-LDL-cholesterol homeostasis.

[0155] In certain embodiments, a method of treating, preventing, or ameliorating a cardiovascular disease comprises administering to the individual a compound comprising a PCSK9 specific inhibitor, thereby treating, preventing, or ameliorating the cardiovascular disease. In certain embodiments, the cardiovascular disease is dyslipidemia or hypercholesterolemia. In certain embodiments, the compound comprises an antisense compound targeted to PCSK9. In certain embodiments, the compound comprises an oligonucleotide targeted to PCSK9. In certain embodiments, a compound comprises a modified oligonucleotide 8 to 80 linked nucleosides in length and having a nucleobase sequence comprising at least 8 contiguous nucleobases of any of the nucleobase sequences of SEQ ID NOs: 3-1540. In certain embodiments, a compound comprises a modified oligonucleotide 14 to 80 linked nucleosides in length and having a nucleobase sequence comprising the nucleobase sequence of any one of SEQ ID NOs: 3-1540. In certain embodiments, a compound comprises a modified oligonucleotide consisting of the nucleobase sequence of any one of SEQ ID NOs: 3-1540. In certain embodiments, a compound comprises a modified oligonucleotide 14 to 80 linked nucleosides in length having a nucleobase sequence comprising any one of SEQ ID NOs: 1016, 1528, 763, 1071, 1147, 1149, 1016, 955, 1195, and 353. In certain embodiments, a compound comprises a modified oligonucleotide having a nucleobase sequence consisting of any one of SEQ ID NOs: 1016, 1528, 763, 1071, 1147, 1149, 1016, 955, 1195, and 353. In any of the foregoing embodiments, the modified oligonucleotide can be 10 to 30 linked nucleosides in length. In certain embodiments, the compound is ISIS 863568, ISIS 863579, ISIS 863581, ISIS 863582, ISIS 863587, ISIS 863633, ISIS 863655, ISIS 863670, and ISIS 863681. In any of the foregoing embodiments, the compound can be single-stranded or double-stranded. In any of the foregoing embodiments, the compound can be an antisense compound or oligomeric compound. In certain embodiments, the compound is administered to the individual parenterally. In certain embodiments, administering the compound reduces LDL-cholesterol levels. In certain embodiments, administering the compound reduces Lp(a) levels. In certain embodiments, administering the compound induces LDL receptor (LDL-R) activity. In certain embodiments, administering the compound regulates LDL receptor-LDL-cholesterol homeostasis.

[0156] In certain embodiments, a method of inhibiting expression of PCSK9 in an individual having, or at risk of having, a disease associated with PCSK9 comprises administering to the individual a compound comprising a PCSK9 specific inhibitor, thereby inhibiting expression of PCSK9 in the individual. In certain embodiments, administering the compound inhibits expression of PCSK9 in the liver. In certain embodiments, the disease is a cardiovascular disease. In certain embodiments, the individual has, or is at risk of having dyslipidemia. In certain embodiments, the individual has, or is at risk of having hypercholesterolemia. In certain embodiments, the individual has, or is at risk of having mixed dyslipidemia. In certain embodiments, the compound comprises an antisense compound targeted to PCSK9. In certain embodiments, the compound comprises an oligonucleotide targeted to PCSK9. In certain embodiments, a compound comprises a modified oligonucleotide 8 to 80 linked nucleosides in length and having a nucleobase sequence comprising at least 8 contiguous nucleobases of any of the nucleobase sequences of SEQ ID NOs: 3-1540. In certain embodiments, a compound comprises a modified oligonucleotide 14 to 80 linked nucleosides in length and having a nucleobase sequence comprising the nucleobase sequence of any one of SEQ ID NOs: 3-1540. In certain embodiments, a compound comprises a modified oligonucleotide consisting of the nucleobase sequence of any one of SEQ ID NOs: 3-1540. In certain embodiments, a compound comprises a modified oligonucleotide 14 to 80 linked nucleosides in length having a nucleobase sequence comprising any one of SEQ ID NOs: 1016, 1528, 763, 1071, 1147, 1149, 1016, 955, 1195, and 353. In certain embodiments, a compound comprises a modified oligonucleotide having a nucleobase sequence consisting of any one of SEQ ID NOs: 1016, 1528, 763, 1071, 1147, 1149, 1016, 955, 1195, and 353. In any of the foregoing embodiments, the modified oligonucleotide can be 10 to 30 linked nucleosides in length. In certain embodiments, the compound is ISIS 863568, ISIS 863579, ISIS 863581, ISIS 863582, ISIS 863587, ISIS 863633, ISIS 863655, ISIS 863670, and ISIS 863681. In any of the foregoing embodiments, the compound can be single-stranded or double-stranded. In any of the foregoing embodiments, the compound can be an antisense compound or oligomeric compound. In certain embodiments, the compound is administered to the individual parenterally. In certain embodiments, administering the compound reduces LDL-cholesterol levels. In certain embodiments, administering the compound reduces Lp(a) levels. In certain embodiments, administering the compound induces LDL receptor (LDL-R) activity. In certain embodiments, administering the compound regulates LDL receptor-LDL-cholesterol homeostasis.

[0157] In certain embodiments, a method of inhibiting expression of PCSK9 in a cell comprises contacting the cell with a compound comprising a PCSK9 specific inhibitor, thereby inhibiting expression of PCSK9 in the cell. In certain embodiments, the cell is a hepatocyte. In certain embodiments, the cell is in the liver. In certain embodiments, the cell is in the liver of an individual who has, or is at risk of having a cardiovascular disease. In certain embodiments, the cell is in the liver of an individual who has, or is at risk of having dyslipidemia. In certain embodiments, the cell is in the liver of an individual who has, or is at risk of having mixed dyslipidemia. In certain embodiments, the cell is in the liver of an individual who has, or is at risk of having hypercholesterolemia. In certain embodiments, administering the compound inhibits expression of PCSK9 in the liver. In certain embodiments, the individual has, or is at risk of having, a cardiovascular disease. In certain embodiments, the individual has, or is at risk of having dyslipidemia. In certain embodiments, the individual has, or is at risk of having mixed dyslipidemia. In certain embodiments, the individual has, or is at risk of having hypercholesterolemia. In certain embodiments, the compound comprises an antisense compound targeted to PCSK9. In certain embodiments, the compound comprises an oligonucleotide targeted to PCSK9. In certain embodiments, a compound comprises a modified oligonucleotide 8 to 80 linked nucleosides in length and having a nucleobase sequence comprising at least 8 contiguous nucleobases of any of the nucleobase sequences of SEQ ID NOs: 3-1540. In certain embodiments, a compound comprises a modified oligonucleotide 14 to 80 linked nucleosides in length and having a nucleobase sequence comprising the nucleobase sequence of any one of SEQ ID NOs: 3-1540. In certain embodiments, a compound comprises a modified oligonucleotide consisting of the nucleobase sequence of any one of SEQ ID NOs: 3-1540. In certain embodiments, a compound comprises a modified oligonucleotide 14 to 80 linked nucleosides in length having a nucleobase sequence comprising any one of SEQ ID NOs: 1016, 1528, 763, 1071, 1147, 1149, 1016, 955, 1195, and 353. In certain embodiments, a compound comprises a modified oligonucleotide having a nucleobase sequence consisting of any one of SEQ ID NOs: 1016, 1528, 763, 1071, 1147, 1149, 1016, 955, 1195, and 353. In any of the foregoing embodiments, the modified oligonucleotide can be 10 to 30 linked nucleosides in length. In certain embodiments, the compound is ISIS 863568, ISIS 863579, ISIS 863581, ISIS 863582, ISIS 863587, ISIS 863633, ISIS 863655, ISIS 863670, and ISIS 863681. In any of the foregoing embodiments, the compound can be single-stranded or double-stranded. In any of the foregoing embodiments, the compound can be an antisense compound or oligomeric compound.

[0158] In certain embodiments, a method of reducing or inhibiting LDL-cholesterol levels, reducing or inhibiting Lp(a) levels, inducing LDL receptor (LDL-R) activity, or regulating LDL receptor-LDL-cholesterol homeostasis in the liver of an individual having, or at risk of having, a disease associated with PCSK9 comprises administering to the individual a compound comprising a PCSK9 specific inhibitor, thereby reducing or inhibiting LDL-cholesterol and Lp(a) levels, inducing LDL receptor (LDL-R) activity, and regulating LDL receptor-LDL-cholesterol homeostasis in the liver of the individual. In certain embodiments, the individual has, or is at risk of having, a cardiovascular disease. In certain embodiments, the individual has, or is at risk of having, dyslipidemia. In certain embodiments, the individual has, or is at risk of having, mixed dyslipidemia. In certain embodiments, the individual has, or is at risk of having, hypercholesterolemia. In certain embodiments, the compound comprises an antisense compound targeted to PCSK9. In certain embodiments, the compound comprises an oligonucleotide targeted to PCSK9. In certain embodiments, a compound comprises a modified oligonucleotide 8 to 80 linked nucleosides in length and having a nucleobase sequence comprising at least 8 contiguous nucleobases of any of the nucleobase sequences of SEQ ID NOs: 3-1540. In certain embodiments, a compound comprises a modified oligonucleotide 14 to 80 linked nucleosides in length and having a nucleobase sequence comprising the nucleobase sequence of any one of SEQ ID NOs: 3-1540.

[0159] In certain embodiments, a compound comprises a modified oligonucleotide consisting of the nucleobase sequence of any one of SEQ ID NOs: 3-1540. In certain embodiments, a compound comprises a modified oligonucleotide 14 to 80 linked nucleosides in length having a nucleobase sequence comprising any one of SEQ ID NOs: 1016, 1528, 763, 1071, 1147, 1149, 1016, 955, 1195, and 353. In certain embodiments, a compound comprises a modified oligonucleotide having a nucleobase sequence consisting of any one of SEQ ID NOs: 1016, 1528, 763, 1071, 1147, 1149, 1016, 955, 1195, and 353. In any of the foregoing embodiments, the modified oligonucleotide can be 10 to 30 linked nucleosides in length. In certain embodiments, the compound is ISIS 863568, ISIS 863579, ISIS 863581, ISIS 863582, ISIS 863587, ISIS 863633, ISIS 863655, ISIS 863670, and ISIS 863681. In any of the foregoing embodiments, the compound can be single-stranded or double-stranded. In any of the foregoing embodiments, the compound can be an antisense compound or oligomeric compound. In certain embodiments, the compound is administered to the individual parenterally. In certain embodiments, the individual is identified as having or at risk of having a disease associated with PCSK9.

[0160] Certain embodiments are drawn to a compound comprising a PCSK9 specific inhibitor for use in treating a disease associated with PCSK9. In certain embodiments, the disease is a cardiovascular disease. In certain embodiments, the disease is dyslipidemia. In certain embodiments, the disease is mixed dyslipidemia. In certain embodiments, the disease is hypercholesterolemia In certain embodiments, the compound comprises an antisense compound targeted to PCSK9. In certain embodiments, the compound comprises an oligonucleotide targeted to PCSK9. In certain embodiments, a compound comprises a modified oligonucleotide 8 to 80 linked nucleosides in length and having a nucleobase sequence comprising at least 8 contiguous nucleobases of any of the nucleobase sequences of SEQ ID NOs: 3-1540. In certain embodiments, a compound comprises a modified oligonucleotide 14 to 80 linked nucleosides in length and having a nucleobase sequence comprising the nucleobase sequence of any one of SEQ ID NOs: 3-1540. In certain embodiments, a compound comprises a modified oligonucleotide consisting of the nucleobase sequence of any one of SEQ ID NOs: 3-1540. In certain embodiments, a compound comprises a modified oligonucleotide 14 to 80 linked nucleosides in length having a nucleobase sequence comprising any one of SEQ ID NOs: 1016, 1528, 763, 1071, 1147, 1149, 1016, 955, 1195, and 353. In certain embodiments, a compound comprises a modified oligonucleotide having a nucleobase sequence consisting of any one of SEQ ID NOs: 1016, 1528, 763, 1071, 1147, 1149, 1016, 955, 1195, and 353. In any of the foregoing embodiments, the modified oligonucleotide can be 10 to 30 linked nucleosides in length. In certain embodiments, the compound is ISIS 863568, ISIS 863579, ISIS 863581, ISIS 863582, ISIS 863587, ISIS 863633, ISIS 863655, ISIS 863670, and ISIS 863681. In any of the foregoing embodiments, the compound can be single-stranded or double-stranded. In any of the foregoing embodiments, the compound can be an antisense compound or oligomeric compound. In certain embodiments, the compound is administered to the individual parenterally.

[0161] Certain embodiments are drawn to a compound comprising a PCSK9 specific inhibitor for use in reducing or inhibiting LDL-cholesterol, reducing or inhibiting Lp(a) levels, inducing LDL receptor (LDL-R) activity, and regulating LDL receptor-LDL-cholesterol homeostasis of an individual having or at risk of having a cardiovascular disease. In certain embodiments, the cardiovascular disease is dyslipidemia or hypercholesterolemia. In certain embodiments, the compound comprises an antisense compound targeted to PCSK9. In certain embodiments, the compound comprises an oligonucleotide targeted to PCSK9. In certain embodiments, a compound comprises a modified oligonucleotide 8 to 80 linked nucleosides in length and having a nucleobase sequence comprising at least 8 contiguous nucleobases of any of the nucleobase sequences of SEQ ID NOs: 3-1540. In certain embodiments, a compound comprises a modified oligonucleotide 14 to 80 linked nucleosides in length and having a nucleobase sequence comprising the nucleobase sequence of any one of SEQ ID NOs: 3-1540. In certain embodiments, a compound comprises a modified oligonucleotide consisting of the nucleobase sequence of any one of SEQ ID NOs: 3-1540. In certain embodiments, a compound comprises a modified oligonucleotide 14 to 80 linked nucleosides in length having a nucleobase sequence comprising any one of SEQ ID NOs: 1016, 1528, 763, 1071, 1147, 1149, 1016, 955, 1195, and 353. In certain embodiments, a compound comprises a modified oligonucleotide having a nucleobase sequence consisting of any one of SEQ ID NOs: 1016, 1528, 763, 1071, 1147, 1149, 1016, 955, 1195, and 353. In any of the foregoing embodiments, the modified oligonucleotide can be 10 to 30 linked nucleosides in length. In certain embodiments, the compound is ISIS 863568, ISIS 863579, ISIS 863581, ISIS 863582, ISIS 863587, ISIS 863633, ISIS 863655, ISIS 863670, and ISIS 863681. In any of the foregoing embodiments, the compound can be single-stranded or double-stranded. In any of the foregoing embodiments, the compound can be an antisense compound or oligomeric compound.

[0162] Certain embodiments are drawn to use of a compound comprising a PCSK9 specific inhibitor for the manufacture or preparation of a medicament for treating a disease associated with PCSK9. Certain embodiments are drawn to use of a compound comprising a PCSK9 specific inhibitor for the preparation of a medicament for treating a disease associated with PCSK9. In certain embodiments, the disease is a cardiovascular disease. In certain embodiments, the disease is dyslipidemia. In certain embodiments, the disease is mixed dyslipidemia. In certain embodiments, the disease is hypercholesterolemia. In certain embodiments, the compound comprises an antisense compound targeted to PCSK9. In certain embodiments, the compound comprises an oligonucleotide targeted to PCSK9. In certain embodiments, a compound comprises a modified oligonucleotide 8 to 80 linked nucleosides in length and having a nucleobase sequence comprising at least 8 contiguous nucleobases of any of the nucleobase sequences of SEQ ID NOs: 3-1540. In certain embodiments, a compound comprises a modified oligonucleotide 14 to 80 linked nucleosides in length and having a nucleobase sequence comprising the nucleobase sequence of any one of SEQ ID NOs: 3-1540. In certain embodiments, a compound comprises a modified oligonucleotide consisting of the nucleobase sequence of any one of SEQ ID NOs: 3-1540. In certain embodiments, a compound comprises a modified oligonucleotide 14 to 80 linked nucleosides in length having a nucleobase sequence comprising any one of SEQ ID NOs: 1016, 1528, 763, 1071, 1147, 1149, 1016, 955, 1195, and 353. In certain embodiments, a compound comprises a modified oligonucleotide having a nucleobase sequence consisting of any one of SEQ ID NOs: 1016, 1528, 763, 1071, 1147, 1149, 1016, 955, 1195, and 353. In any of the foregoing embodiments, the modified oligonucleotide can be 10 to 30 linked nucleosides in length. In certain embodiments, the compound is ISIS 863568, ISIS 863579, ISIS 863581, ISIS 863582, ISIS 863587, ISIS 863633, ISIS 863655, ISIS 863670, and ISIS 863681. In any of the foregoing embodiments, the compound can be single-stranded or double-stranded. In any of the foregoing embodiments, the compound can be an antisense compound or oligomeric compound.

[0163] Certain embodiments are drawn to use of a compound comprising a PCSK9 specific inhibitor for the manufacture or preparation of a medicament for reducing or inhibiting LDL-cholesterol levels, reducing or inhibiting Lp(a) levels, inducing LDL receptor (LDL-R) activity, and regulating LDL receptor-LDL-cholesterol homeostasis of an individual having or at risk of having a cardiovascular disease. In certain embodiments, the cardiovascular disease is dyslipidemia or hypercholesterolemia. Certain embodiments are drawn to use of a compound comprising a PCSK9 specific inhibitor for the preparation of a medicament for reducing or inhibiting LDL-cholesterol levels, reducing or inhibiting Lp(a) levels, inducing LDL receptor (LDL-R) activity, and regulating LDL receptor-LDL-cholesterol homeostasis of an individual having or at risk of having a cardiovascular disease. In certain embodiments, the cardiovascular disease is dyslipidemia or hypercholesterolemia. In certain embodiments, the compound comprises an antisense compound targeted to PCSK9. In certain embodiments, the compound comprises an oligonucleotide targeted to PCSK9. In certain embodiments, a compound comprises a modified oligonucleotide 8 to 80 linked nucleosides in length and having a nucleobase sequence comprising at least 8 contiguous nucleobases of any of the nucleobase sequences of SEQ ID NOs: 3-1540. In certain embodiments, a compound comprises a modified oligonucleotide 14 to 80 linked nucleosides in length and having a nucleobase sequence comprising the nucleobase sequence of any one of SEQ ID NOs: 3-1540. In certain embodiments, a compound comprises a modified oligonucleotide consisting of the nucleobase sequence of any one of SEQ ID NOs: 3-1540. In certain embodiments, a compound comprises a modified oligonucleotide 14 to 80 linked nucleosides in length having a nucleobase sequence comprising any one of SEQ ID NOs: 1016, 1528, 763, 1071, 1147, 1149, 1016, 955, 1195, and 353. In certain embodiments, a compound comprises a modified oligonucleotide having a nucleobase sequence consisting of any one of SEQ ID NOs: 1016, 1528, 763, 1071, 1147, 1149, 1016, 955, 1195, and 353. In any of the foregoing embodiments, the modified oligonucleotide can be 10 to 30 linked nucleosides in length. In certain embodiments, the compound is ISIS 863568, ISIS 863579, ISIS 863581, ISIS 863582, ISIS 863587, ISIS 863633, ISIS 863655, ISIS 863670, and ISIS 863681. In any of the foregoing embodiments, the compound can be single-stranded or double-stranded. In any of the foregoing embodiments, the compound can be an antisense compound or oligomeric compound.

[0164] In any of the foregoing methods or uses, the compound can be targeted to PCSK9. In certain embodiments, the compound comprises or consists of a modified oligonucleotide, for example a modified oligonucleotide 8 to 80 linked nucleosides in length, 10 to 30 linked nucleosides in length, 12 to 30 linked nucleosides in length, or 20 linked nucleosides in length. In certain embodiments, the modified oligonucleotide is at least 80%, 85%, 90%, 95% or 100% complementary to any of the nucleobase sequences recited in SEQ ID NOs: 1, 2, 1545-1550. In certain embodiments, the modified oligonucleotide comprises at least one modified internucleoside linkage, at least one modified sugar and/or at least one modified nucleobase. In certain embodiments, the modified internucleoside linkage is a phosphorothioate internucleoside linkage, the modified sugar is a bicyclic sugar or a 2′-O-methoxyethyl, and the modified nucleobase is a 5-methylcytosine. In certain embodiments, the modified oligonucleotide comprises a gap segment consisting of linked deoxynucleosides; a 5′ wing segment consisting of linked nucleosides; and a 3′ wing segment consisting of linked nucleosides, wherein the gap segment is positioned immediately adjacent to and between the 5′ wing segment and the 3′ wing segment and wherein each nucleoside of each wing segment comprises a modified sugar.

[0165] In any of the foregoing embodiments, the modified oligonucleotide is 12 to 30, 15 to 30, 15 to 25, 15 to 24, 16 to 24, 17 to 24, 18 to 24, 19 to 24, 20 to 24, 19 to 22, 20 to 22, 16 to 20, or 17 or 20 linked nucleosides in length. In certain embodiments, the modified oligonucleotide is at least 80%, 85%, 90%, 95% or 100% complementary to any of the nucleobase sequences recited in SEQ ID NOs: 1, 2, 1545-1550. In certain embodiments, the modified oligonucleotide comprises at least one modified internucleoside linkage, at least one modified sugar and/or at least one modified nucleobase. In certain embodiments, the modified internucleoside linkage is a phosphorothioate internucleoside linkage, the modified sugar is a bicyclic sugar or a 2′-O-methoxyethyl, and the modified nucleobase is a 5-methylcytosine. In certain embodiments, the modified oligonucleotide comprises a gap segment consisting of linked 2′-deoxynucleosides; a 5′ wing segment consisting of linked nucleosides; and a 3′ wing segment consisting of linked nucleosides, wherein the gap segment is positioned immediately adjacent to and between the 5′ wing segment and the 3′ wing segment and wherein each nucleoside of each wing segment comprises a modified sugar.

[0166] In any of the foregoing methods or uses, the compound comprises or consists of a modified oligonucleotide 14 to 30 linked nucleosides in length and having a nucleobase sequence comprising any one of SEQ ID NOs: 3-1540, wherein the modified oligonucleotide comprises:
[0167] a gap segment consisting of linked 2′-deoxynucleosides;
[0168] a 5′ wing segment consisting of linked nucleosides; and
[0169] a 3′ wing segment consisting of linked nucleosides;
   wherein the gap segment is positioned between the 5′ wing segment and the 3′ wing segment and wherein each nucleoside of each wing segment comprises a modified sugar.

[0170] In any of the foregoing methods or uses, the compound comprises or consists a modified oligonucleotide 16 to 80 linked nucleobases in length having a nucleobase sequence comprising or consisting of the sequence recited in any one of SEQ ID NOs: 1016, 1528, 763, 1071, 1147, 1149, 1016, 955, 1195, and 353, wherein the modified oligonucleotide comprises
[0171] a gap segment consisting of ten linked deoxynucleosides;
[0172] a 5′ wing segment consisting of three linked nucleosides; and
[0173] a 3′ wing segment consisting of three linked nucleosides;
   [0174] wherein the gap segment is positioned between the 5′ wing segment and the 3′ wing segment, wherein each nucleoside of each wing segment comprises a cEt sugar; wherein each internucleoside linkage is a phosphorothioate linkage; wherein each cytosine is a 5-methylcytosine. In certain embodiments, the modified oligonucleotide is 16-80 linked nucleosides in length. In certain embodiments, the modified oligonucleotide is 16-30 linked nucleosides in length.

[0175] In any of the foregoing methods or uses, the compound comprises or consists of ISIS 863633 or salt thereof, having the following chemical structure:

[chemical structure]

In any of the foregoing methods or uses, the compound comprises or consists of ISIS 863633 or salt thereof, having the following chemical structure:

[chemical structure]

[0176] In any of the foregoing methods or uses, the compound comprises or consists of the sodium salt of ISIS 863633, having the following chemical structure:

[chemical structure]

[0177] In any of the foregoing methods or uses, the compound can be administered parenterally. For example, in certain embodiments the compound can be administered through injection or infusion. Parenteral administration includes subcutaneous administration, intravenous administration, intramuscular administration, intraarterial administration, intraperitoneal administration, or intracranial administration, e.g. intrathecal or intracerebroventricular administration.

### Certain Compounds

[0178] In certain embodiments, compounds described herein can be antisense compounds. In certain embodiments, the antisense compound comprises or consists of an oligomeric compound. In certain embodiments, the oligomeric compound comprises a modified oligonucleotide. In certain embodiments, the modified oligonucleotide has a nucleobase sequence complementary to that of a target nucleic acid.

[0179] In certain embodiments, a compound described herein comprises or consists of a modified oligonucleotide. In certain embodiments, the modified oligonucleotide has a nucleobase sequence complementary to that of a target nucleic acid.

[0180] In certain embodiments, a compound or antisense compound is single-stranded. Such a single-stranded compound or antisense compound comprises or consists of an oligomeric compound. In certain embodiments, such an oligomeric compound comprises or consists of an oligonucleotide and optionally a conjugate group. In certain embodiments, the oligonucleotide is an antisense oligonucleotide. In certain embodiments, the oligonucleotide is modified. In certain embodiments, the oligonucleotide of a single-stranded antisense compound or oligomeric compound comprises a self-complementary nucleobase sequence.

[0181] In certain embodiments, compounds are double-stranded. Such double-stranded compounds comprise a first modified oligonucleotide having a region complementary to a target nucleic acid and a second modified oligonucleotide having a region complementary to the first modified oligonucleotide. In certain embodiments, the modified oligonucleotide is an RNA oligonucleotide. In such embodiments, the thymine nucleobase in the modified oligonucleotide is replaced by a uracil nucleobase. In certain embodiments, compound comprises a conjugate group. In certain embodiments, one of the modified oligonucleotides is conjugated. In certain embodiments, both the modified oligonucleotides are conjugated. In certain embodiments, the first modified oligonucleotide is conjugated. In certain embodiments, the second modified oligonucleotide is conjugated. In certain embodiments, the first modified oligonucleotide is 12-30 linked nucleosides in length and the second modified oligonucleotide is 12-30 linked nucleosides in length. In certain embodiments, one of the modified oligonucleotides has a nucleobase sequence comprising at least 8 contiguous nucleobases of any of SEQ ID NOs: 3-1540.

[0182] In certain embodiments, antisense compounds are double-stranded. Such double-stranded antisense compounds comprise a first oligomeric compound having a region complementary to a target nucleic acid and a second oligomeric compound having a region complementary to the first oligomeric compound. The first oligomeric compound of such double stranded antisense compounds typically comprises or consists of a modified oligonucleotide and optionally a conjugate group. The oligonucleotide of the second oligomeric compound of such double-stranded antisense compound may be modified or unmodified. Either or both oligomeric compounds of a double-stranded antisense compound may comprise a conjugate group. The oligomeric compounds of double-stranded antisense compounds may include non-complementary overhanging nucleosides.

[0183] Examples of single-stranded and double-stranded compounds include but are not limited to oligonucleotides, siRNAs, microRNA targeting oligonucleotides, and single-stranded RNAi compounds, such as small hairpin RNAs (shRNAs), single-stranded siRNAs (ssRNAs), and microRNA mimics.

[0184] In certain embodiments, a compound described herein has a nucleobase sequence that, when written in the 5′ to 3′ direction, comprises the reverse complement of the target segment of a target nucleic acid to which it is targeted.

[0185] In certain embodiments, a compound described herein comprises an oligonucleotide 10 to 30 linked subunits in length. In certain embodiments, a compound described herein comprises an oligonucleotide 12 to 30 linked subunits in length. In certain embodiments, a compound described herein comprises an oligonucleotide 12 to 22 linked subunits in length. In certain embodiments, compound described herein comprises an oligonucleotide 14 to 30 linked subunits in length. In certain embodiments, compound described herein comprises an oligonucleotide 14 to 20 linked subunits in length. In certain embodiments, a compound described herein comprises an oligonucleotide 15 to 30 linked subunits in length. In certain embodiments, a compound described herein comprises an oligonucleotide 15 to 20 linked subunits in length. In certain embodiments, a compound described herein comprises an oligonucleotide 16 to 30 linked subunits in length. In certain embodiments, a compound described herein comprises an oligonucleotide 16 to 20 linked subunits in length. In certain embodiments, a compound described herein comprises an oligonucleotide 17 to 30 linked subunits in length. In certain embodiments, a compound described herein comprises an oligonucleotide 17 to 20 linked subunits in length. In certain embodiments, a compound described herein comprises an oligonucleotide 18 to 30 linked subunits in length. In certain embodiments, a compound described herein comprises an oligonucleotide 18 to 21 linked subunits in length. In certain embodiments, a compound described herein comprises an oligonucleotide 18 to 20 linked subunits in length. In certain embodiments, a compound described herein comprises an oligonucleotide 20 to 30 linked subunits in length. In other words, such oligonucleotides are 12 to 30 linked subunits, 14 to 30 linked subunits, 14 to 20 subunits, 15 to 30 subunits, 15 to 20 subunits, 16 to 30 subunits, 16 to 20 subunits, 17 to 30 subunits, 17 to 20 subunits, 18 to 30 subunits, 18 to 20 subunits, 18 to 21 subunits, 20 to 30 subunits, or 12 to 22 linked subunits in length, respectively. In certain embodiments, a compound described herein comprises an oligonucleotide 14 linked subunits in length. In certain embodiments, a compound described herein comprises an oligonucleotide 16 linked subunits in length. In certain embodiments, a compound described herein comprises an oligonucleotide 17 linked subunits in length. In certain embodiments, compound described herein comprises an oligonucleotide 18 linked subunits in length. In certain embodiments, a compound described herein comprises an oligonucleotide 19 linked subunits in length. In certain embodiments, a compound described herein comprises an oligonucleotide 20 linked subunits in length. In other embodiments, a compound described herein comprises an oligonucleotide 8 to 80, 12 to 50, 13 to 30, 13 to 50, 14 to 30, 14 to 50, 15 to 30, 15 to 50, 16 to 30, 16 to 50, 17 to 30, 17 to 50, 18 to 22, 18 to 24, 18 to 30, 18 to 50, 19 to 22, 19 to 30, 19 to 50, or 20 to 30 linked subunits. In certain such embodiments, the compound described herein comprises an oligonucleotide 8, 9, 10, 11, 12, 13, 14, 15, 16, 17, 18, 19, 20, 21, 22, 23, 24, 25, 26, 27, 28, 29, 30, 31, 32, 33, 34, 35, 36, 37, 38, 39, 40, 41, 42, 43, 44, 45, 46, 47, 48, 49, 50, 51, 52, 53, 54, 55, 56, 57, 58, 59, 60, 61, 62, 63, 64, 65, 66, 67, 68, 69, 70, 71, 72, 73, 74, 75, 76, 77, 78, 79, or 80 linked subunits in length, or a range defined by any two of the above values. In some embodiments the linked subunits are nucleotides, nucleosides, or nucleobases.

[0186] In certain embodiments, the compound may further comprise additional features or elements, such as a conjugate group, that are attached to the oligonucleotide. In certain embodiments, such compounds are antisense compounds. In certain embodiments, such compounds are oligomeric compounds. In embodiments where a conjugate group comprises a nucleoside (i.e. a nucleoside that links the conjugate group to the oligonucleotide), the nucleoside of the conjugate group is not counted in the length of the oligonucleotide.

[0187] In certain embodiments, compounds may be shortened or truncated. For example, a single subunit may be deleted from the 5′ end (5′ truncation), or alternatively from the 3′ end (3′ truncation). A shortened or truncated compound targeted to a PCSK9 nucleic acid may have two subunits deleted from the 5′ end, or alternatively may have two subunits deleted from the 3′ end, of the compound. Alternatively, the deleted nucleosides may be dispersed throughout the compound.

[0188] When a single additional subunit is present in a lengthened compound, the additional subunit may be located at the 5′ or 3′ end of the compound. When two or more additional subunits are present, the added subunits may be adjacent to each other, for example, in a compound having two subunits added to the 5′ end (5′ addition), or alternatively to the 3′ end (3′ addition), of the compound. Alternatively, the added subunits may be dispersed throughout the compound.

[0189] It is possible to increase or decrease the length of a compound, such as an oligonucleotide, and/or introduce mismatch bases without eliminating activity (Woolf et al. Proc. Natl. Acad. Sci. USA 1992, 89:7305-7309; Gautschi et al. J. Natl. Cancer Inst. March 2001, 93:463-471; Maher and Dolnick Nuc. Acid. Res. 1998, 16:3341-3358). However, seemingly small changes in oligonucleotide sequence, chemistry and motif can make large differences in one or more of the many properties required for clinical development (Seth et al. J. Med. Chem. 2009, 52, 10; Egli et al. J. Am. Chem. Soc. 2011, 133, 16642).

[0190] In certain embodiments, compounds described herein are interfering RNA compounds (RNAi), which include double-stranded RNA compounds (also referred to as short-interfering RNA or siRNA) and single-stranded RNAi compounds (or ssRNA). Such compounds work at least in part through the RISC pathway to degrade and/or sequester a target nucleic acid (thus, include microRNA/microRNA-mimic compounds). As used herein, the term siRNA is meant to be equivalent to other terms used to describe nucleic acid molecules that are capable of mediating sequence specific RNAi, for example short interfering RNA (siRNA), double-stranded RNA (dsRNA), micro-RNA (miRNA), short hairpin RNA (shRNA), short interfering oligonucleotide, short interfering nucleic acid, short interfering modified oligonucleotide, chemically modified siRNA, post-transcriptional gene silencing RNA (ptgsRNA), and others. In addition, as used herein, the term “RNAi” is meant to be equivalent to other terms used to describe sequence specific RNA interference, such as post transcriptional gene silencing, translational inhibition, or epigenetics.

[0191] In certain embodiments, a compound described herein can comprise any of the oligonucleotide sequences targeted to PCSK9 described herein. In certain embodiments, the compound can be double-stranded. In certain embodiments, the compound comprises a first strand comprising at least an 8, 9, 10, 11, 12, 13, 14, 15, 16, 17, 18, 19, or 20 contiguous nucleobase portion of any one of SEQ ID NOs: 3-1540 and a second strand. In certain embodiments, the compound comprises a first strand comprising the nucleobase sequence of any one of SEQ ID NOs: 3-1540 and a second strand. In certain embodiments, the compound comprises ribonucleotides in which the first strand has uracil (U) in place of thymine (T) in any one of SEQ ID NOs: 3-1540. In certain embodiments, the compound comprises (i) a first strand comprising a nucleobase sequence complementary to the site on PCSK9 to which any of SEQ ID NOs: 3-1540 is targeted, and (ii) a second strand. In certain embodiments, the compound comprises one or more modified nucleotides in which the 2′ position in the sugar contains a halogen (such as fluorine group; 2′-F) or contains an alkoxy group (such as a methoxy group; 2′-OMe). In certain embodiments, the compound comprises at least one 2′-F sugar modification and at least one 2′-OMe sugar modification. In certain embodiments, the at least one 2′-F sugar modification and at least one 2′-OMe sugar modification are arranged in an alternating pattern for at least 2, 3, 4, 5, 6, 7, 8, 9, 10, 11, 12, 13, 14, 15, 16, 17, 18, 19, or 20 contiguous nucleobases along a strand of the dsRNA compound. In certain embodiments, the compound comprises one or more linkages between adjacent nucleotides other than a naturally-occurring phosphodiester linkage. Examples of such linkages include phosphoramide, phosphorothioate, and phosphorodithioate linkages. The compounds may also be chemically modified nucleic acid molecules as taught in U.S. Pat. No. 6,673,661. In other embodiments, the compound contains one or two capped strands, as disclosed, for example, by WO 00/63364, filed Apr. 19, 2000.

[0192] In certain embodiments, the first strand of the compound is an siRNA guide strand and the second strand of the compound is an siRNA passenger strand. In certain embodiments, the second strand of the compound is complementary to the first strand. In certain embodiments, each strand of the compound is 16, 17, 18, 19, 20, 21, 22, or 23 linked nucleosides in length. In certain embodiments, the first or second strand of the compound can comprise a conjugate group.

[0193] In certain embodiments, a compound described herein can comprise any of the oligonucleotide sequences targeted to PCSK9 described herein. In certain embodiments, the compound is single stranded. In certain embodiments, such a compound is a single-stranded RNAi (ssRNAi) compound. In certain embodiments, the compound comprises at least an 8, 9, 10, 11, 12, 13, 14, 15, 16, 17, 18, 19, or 20 contiguous nucleobase portion of any one of SEQ ID NOs: 3-1540. In certain embodiments, the compound comprises the nucleobase sequence of any one of SEQ ID NOs: 3-1540 In certain embodiments, the compound comprises ribonucleotides in which uracil (U) is in place of thymine (T) in any one of SEQ ID NOs: 3-1540. In certain embodiments, the compound comprises a nucleobase sequence complementary to the site on PCSK9 to which any of SEQ ID NOs: 3-1540 is targeted. In certain embodiments, the compound comprises one or more modified nucleotides in which the 2′ position in the sugar contains a halogen (such as fluorine group; 2′-F) or contains an alkoxy group (such as a methoxy group; 2′-OMe). In certain embodiments, the compound comprises at least one 2′-F sugar modification and at least one 2′-OMe sugar modification. In certain embodiments, the at least one 2′-F sugar modification and at least one 2′-OMe sugar modification are arranged in an alternating pattern for at least 2, 3, 4, 5, 6, 7, 8, 9, 10, 11, 12, 13, 14, 15, 16, 17, 18, 19, or 20 contiguous nucleobases along a strand of the compound. In certain embodiments, the compound comprises one or more linkages between adjacent nucleotides other than a naturally-occurring phosphodiester linkage. Examples of such linkages include phosphoramide, phosphorothioate, and phosphorodithioate linkages. The compounds may also be chemically modified nucleic acid molecules as taught in U.S. Pat. No. 6,673,661. In other embodiments, the compound contains a capped strand, as disclosed, for example, by WO 00/63364, filed Apr. 19, 2000. In certain embodiments, the compound consists of 16, 17, 18, 19, 20, 21, 22, or 23 linked nucleosides. In certain embodiments, the compound can comprise a conjugate group.

[0194] In certain embodiments, compounds described herein comprise modified oligonucleotides. Certain modified oligonucleotides have one or more asymmetric center and thus give rise to enantiomers, diastereomers, and other stereoisomeric configurations that may be defined, in terms of absolute stereochemistry, as (R) or (S), as a or f such as for sugar anomers, or as (D) or (L) such as for amino acids etc. Included in the modified oligonucleotides provided herein are all such possible isomers, including their racemic and optically pure forms, unless specified otherwise. Likewise, all cis- and trans-isomers and tautomeric forms are also included.

[0195] The compounds described herein include variations in which one or more atoms are replaced with a non-radioactive isotope or radioactive isotope of the indicated element. For example, compounds herein that comprise hydrogen atoms encompass all possible deuterium substitutions for each of the ¹H hydrogen atoms. Isotopic substitutions encompassed by the compounds herein include but are not limited to: ²H or ³H in place of ¹H, ¹³C or ¹⁴C in place of ¹²C, ¹⁵N in place of ¹⁴N, ¹⁷O or ¹⁸O in place of ¹⁶O, and ³³S, ³⁴S, ³⁵S, or ³⁶S in place of ³²S. In certain embodiments, non-radioactive isotopic substitutions may impart new properties on the compound that are beneficial for use as a therapeutic or research tool. In certain embodiments, radioactive isotopic substitutions may make the compound suitable for research or diagnostic purposes, such as an imaging assay.

### Certain Mechanisms

[0196] In certain embodiments, compounds described herein comprise or consist of modified oligonucleotides. In certain embodiments, compounds described herein are antisense compounds. In certain embodiments, compounds comprise oligomeric compounds. In certain embodiments, compounds described herein are capable of hybridizing to a target nucleic acid, resulting in at least one antisense activity. In certain embodiments, compounds described herein selectively affect one or more target nucleic acid. Such compounds comprise a nucleobase sequence that hybridizes to one or more target nucleic acid, resulting in one or more desired antisense activity and does not hybridize to one or more non-target nucleic acid or does not hybridize to one or more non-target nucleic acid in such a way that results in a significant undesired antisense activity.

[0197] In certain antisense activities, hybridization of a compound described herein to a target nucleic acid results in recruitment of a protein that cleaves the target nucleic acid. For example, certain compounds described herein result in RNase H mediated cleavage of the target nucleic acid. RNase H is a cellular endonuclease that cleaves the RNA strand of an RNA:DNA duplex. The DNA in such an RNA:DNA duplex need not be unmodified DNA. In certain embodiments, compounds described herein are sufficiently “DNA-like”to elicit RNase H activity. Further, in certain embodiments, one or more non-DNA-like nucleoside in the gap of a gapmer is tolerated.

[0198] In certain antisense activities, compounds described herein or a portion of the compound is loaded into an RNA-induced silencing complex (RISC), ultimately resulting in cleavage of the target nucleic acid. For example, certain compounds described herein result in cleavage of the target nucleic acid by Argonaute. Compounds that are loaded into RISC are RNAi compounds. RNAi compounds may be double-stranded (siRNA) or single-stranded (ssRNA).

[0199] In certain embodiments, hybridization of compounds described herein to a target nucleic acid does not result in recruitment of a protein that cleaves that target nucleic acid. In certain such embodiments, hybridization of the compound to the target nucleic acid results in alteration of splicing of the target nucleic acid. In certain embodiments, hybridization of the compound to a target nucleic acid results in inhibition of a binding interaction between the target nucleic acid and a protein or other nucleic acid. In certain such embodiments, hybridization of the compound to a target nucleic acid results in alteration of translation of the target nucleic acid.

[0200] Antisense activities may be observed directly or indirectly. In certain embodiments, observation or detection of an antisense activity involves observation or detection of a change in an amount of a target nucleic acid or protein encoded by such target nucleic acid, a change in the ratio of splice variants of a nucleic acid or protein, and/or a phenotypic change in a cell or animal.

### Target Nucleic Acids, Target Regions and Nucleotide Sequences

[0201] In certain embodiments, compounds described herein comprise or consist of an oligonucleotide comprising a region that is complementary to a target nucleic acid. In certain embodiments, the target nucleic acid is an endogenous RNA molecule. In certain embodiments, the target nucleic acid encodes a protein. In certain such embodiments, the target nucleic acid is selected from: an mRNA and a pre-mRNA, including intronic, exonic and untranslated regions. In certain embodiments, the target RNA is an mRNA. In certain embodiments, the target nucleic acid is a pre-mRNA. In certain such embodiments, the target region is entirely within an intron. In certain embodiments, the target region spans an intron/exon junction. In certain embodiments, the target region is at least 50% within an intron.

[0202] Nucleotide sequences that encode PCSK9 include, without limitation, the following: RefSEQ No. GENBANK Accession No. NM_174936.3 (SEQ ID NO: 1), GENBANK Accession No. NC_000001.11 truncated from nucleotides 55036001 to 55068000 (SEQ ID NO: 2), GENBANK Accession No. AK124635.1 (SEQ ID NO: 1545), GENBANK Accession No. NT_032977.8 truncated from nucleotides 25475000 to 25504000 (SEQ ID NO: 1546), GENBANK Accession No. DA092236.1 (SEQ ID NO: 1547), GENBANK Accession No. DA803830.1 (SEQ ID NO: 1548), GENBANK Accession No. DC352135.1 (SEQ ID NO: 1549), and GENBANK Accession No. NR_110451.1 (SEQ ID NO: 1550).

### Hybridization

[0203] In some embodiments, hybridization occurs between a compound disclosed herein and a PCSK9 nucleic acid. The most common mechanism of hybridization involves hydrogen bonding (e.g., Watson-Crick, Hoogsteen or reversed Hoogsteen hydrogen bonding) between complementary nucleobases of the nucleic acid molecules.

[0204] Hybridization can occur under varying conditions. Hybridization conditions are sequence-dependent and are determined by the nature and composition of the nucleic acid molecules to be hybridized.

[0205] Methods of determining whether a sequence is specifically hybridizable to a target nucleic acid are well known in the art. In certain embodiments, the compounds provided herein are specifically hybridizable with a PCSK9 nucleic acid.

### Complementarity

[0206] An oligonucleotide is said to be complementary to another nucleic acid when the nucleobase sequence of such oligonucleotide or one or more regions thereof matches the nucleobase sequence of another oligonucleotide or nucleic acid or one or more regions thereof when the two nucleobase sequences are aligned in opposing directions. Nucleobase matches or complementary nucleobases, as described herein, are limited to the following pairs: adenine (A) and thymine (T), adenine (A) and uracil (U), cytosine (C) and guanine (G), and 5-methyl cytosine (mC) and guanine (G) unless otherwise specified. Complementary oligonucleotides and/or nucleic acids need not have nucleobase complementarity at each nucleoside and may include one or more nucleobase mismatches. An oligonucleotide is fully complementary or 100% complementary when such oligonucleotides have nucleobase matches at each nucleoside without any nucleobase mismatches.

[0207] In certain embodiments, compounds described herein comprise or consist of modified oligonucleotides. In certain embodiments, compounds described herein are antisense compounds. In certain embodiments, compounds comprise oligomeric compounds. Non-complementary nucleobases between a compound and a PCSK9 nucleic acid may be tolerated provided that the compound remains able to specifically hybridize to a target nucleic acid. Moreover, a compound may hybridize over one or more segments of a PCSK9 nucleic acid such that intervening or adjacent segments are not involved in the hybridization event (e.g., a loop structure, mismatch or hairpin structure).

[0208] In certain embodiments, the compounds provided herein, or a specified portion thereof, are, are at least, or are up to 70%, 80%, 85%, 86%, 87%, 88%, 89%, 90%, 91%, 92%, 93%, 94%, 95%, 96%, 97%, 98%, 99%, or 100% complementary to a PCSK9 nucleic acid, a target region, target segment, or specified portion thereof. In certain embodiments, the compounds provided herein, or a specified portion thereof, are 70% to 75%, 75% to 80%, 80% to 85%, 85% to 90%, 90% to 95%, 95% to 100%, or any number in between these ranges, complementary to a PCSK9 nucleic acid, a target region, target segment, or specified portion thereof. Percent complementarity of a compound with a target nucleic acid can be determined using routine methods.

[0209] For example, a compound in which 18 of 20 nucleobases of the compound are complementary to a target region, and would therefore specifically hybridize, would represent 90 percent complementarity. In this example, the remaining non-complementary nucleobases may be clustered or interspersed with complementary nucleobases and need not be contiguous to each other or to complementary nucleobases. As such, a compound which is 18 nucleobases in length having four non-complementary nucleobases which are flanked by two regions of complete complementarity with the target nucleic acid would have 77.8% overall complementarity with the target nucleic acid. Percent complementarity of a compound with a region of a target nucleic acid can be determined routinely using BLAST programs (basic local alignment search tools) and PowerBLAST programs known in the art (Altschul et al., J. Mol. Biol., 1990, 215, 403 410; Zhang and Madden, Genome Res., 1997, 7, 649 656). Percent homology, sequence identity or complementarity, can be determined by, for example, the Gap program (Wisconsin Sequence Analysis Package, Version 8 for Unix, Genetics Computer Group, University Research Park, Madison Wis.), using default settings, which uses the algorithm of Smith and Waterman (Adv. Appl. Math., 1981, 2, 482 489).

[0210] In certain embodiments, compounds described herein, or specified portions thereof, are fully complementary (i.e. 100% complementary) to a target nucleic acid, or specified portion thereof. For example, a compound may be fully complementary to a PCSK9 nucleic acid, or a target region, or a target segment or target sequence thereof. As used herein, “fully complementary” means each nucleobase of a compound is complementary to the corresponding nucleobase of a target nucleic acid. For example, a 20 nucleobase compound is fully complementary to a target sequence that is 400 nucleobases long, so long as there is a corresponding 20 nucleobase portion of the target nucleic acid that is fully complementary to the compound. Fully complementary can also be used in reference to a specified portion of the first and/or the second nucleic acid. For example, a 20 nucleobase portion of a 30 nucleobase compound can be “fully complementary” to a target sequence that is 400 nucleobases long. The 20 nucleobase portion of the 30 nucleobase compound is fully complementary to the target sequence if the target sequence has a corresponding 20 nucleobase portion wherein each nucleobase is complementary to the 20 nucleobase portion of the compound. At the same time, the entire 30 nucleobase compound may or may not be fully complementary to the target sequence, depending on whether the remaining 10 nucleobases of the compound are also complementary to the target sequence.

[0211] In certain embodiments, compounds described herein comprise one or more mismatched nucleobases relative to the target nucleic acid. In certain such embodiments, antisense activity against the target is reduced by such mismatch, but activity against a non-target is reduced by a greater amount. Thus, in certain such embodiments selectivity of the compound is improved. In certain embodiments, the mismatch is specifically positioned within an oligonucleotide having a gapmer motif In certain such embodiments, the mismatch is at position 1, 2, 3, 4, 5, 6, 7, or 8 from the 5′-end of the gap region. In certain such embodiments, the mismatch is at position 9, 8, 7, 6, 5, 4, 3, 2, 1 from the 3′-end of the gap region. In certain such embodiments, the mismatch is at position 1, 2, 3, or 4 from the 5′-end of the wing region. In certain such embodiments, the mismatch is at position 4, 3, 2, or 1 from the 3′-end of the wing region. In certain embodiments, the mismatch is specifically positioned within an oligonucleotide not having a gapmer motif In certain such embodiments, the mismatch is at position 1, 2, 3, 4, 5, 6, 7, 8, 9, 10, 11, or 12 from the 5′-end of the oligonucleotide. In certain such embodiments, the mismatch is at position, 2, 3, 4, 5, 6, 7, 8, 9, 10, 11, or 12 from the 3′-end of the oligonucleotide.

[0212] The location of a non-complementary nucleobase may be at the 5′ end or 3′ end of the compound. Alternatively, the non-complementary nucleobase or nucleobases may be at an internal position of the compound. When two or more non-complementary nucleobases are present, they may be contiguous (i.e. linked) or non-contiguous. In one embodiment, a non-complementary nucleobase is located in the wing segment of a gapmer oligonucleotide.

[0213] In certain embodiments, compounds described herein that are, or are up to 11, 12, 13, 14, 15, 16, 17, 18, 19, or 20 nucleobases in length comprise no more than 4, no more than 3, no more than 2, or no more than 1 non-complementary nucleobase(s) relative to a target nucleic acid, such as a PCSK9 nucleic acid, or specified portion thereof.

[0214] In certain embodiments, compounds described herein that are, or are up to 11, 12, 13, 14, 15, 16, 17, 18, 19, 20, 21, 22, 23, 24, 25, 26, 27, 28, 29, or 30 nucleobases in length comprise no more than 6, no more than 5, no more than 4, no more than 3, no more than 2, or no more than 1 non-complementary nucleobase(s) relative to a target nucleic acid, such as a PCSK9 nucleic acid, or specified portion thereof.

[0215] In certain embodiments, compounds described herein also include those which are complementary to a portion of a target nucleic acid. As used herein, “portion” refers to a defined number of contiguous (i.e. linked) nucleobases within a region or segment of a target nucleic acid. A “portion” can also refer to a defined number of contiguous nucleobases of a compound. In certain embodiments, the—compounds, are complementary to at least an 8 nucleobase portion of a target segment. In certain embodiments, the compounds are complementary to at least a 9 nucleobase portion of a target segment. In certain embodiments, the compounds are complementary to at least a 10 nucleobase portion of a target segment. In certain embodiments, the compounds are complementary to at least an 11 nucleobase portion of a target segment. In certain embodiments, the compounds are complementary to at least a 12 nucleobase portion of a target segment. In certain embodiments, the compounds are complementary to at least a 13 nucleobase portion of a target segment. In certain embodiments, the compounds are complementary to at least a 14 nucleobase portion of a target segment. In certain embodiments, the compounds are complementary to at least a 15 nucleobase portion of a target segment. In certain embodiments, the compounds are complementary to at least a 16 nucleobase portion of a target segment. Also contemplated are compounds that are complementary to at least a 9, 10, 11, 12, 13, 14, 15, 16, 17, 18, 19, 20, or more nucleobase portion of a target segment, or a range defined by any two of these values.

### Identity

[0216] The compounds provided herein may also have a defined percent identity to a particular nucleotide sequence, SEQ ID NO, or compound represented by a specific ION number, or portion thereof. In certain embodiments, compounds described herein are antisense compounds or oligomeric compounds. In certain embodiments, compounds described herein are modified oligonucleotides. As used herein, a compound is identical to the sequence disclosed herein if it has the same nucleobase pairing ability. For example, a RNA which contains uracil in place of thymidine in a disclosed DNA sequence would be considered identical to the DNA sequence since both uracil and thymidine pair with adenine. Shortened and lengthened versions of the compounds described herein as well as compounds having non-identical bases relative to the compounds provided herein also are contemplated. The non-identical bases may be adjacent to each other or dispersed throughout the compound. Percent identity of an compound is calculated according to the number of bases that have identical base pairing relative to the sequence to which it is being compared.

[0217] In certain embodiments, compounds described herein, or portions thereof, are, or are at least, 70%, 75%, 80%, 85%, 90%, 91%, 92%, 93%, 94%, 95%, 96%, 97%, 98%, 99% or 100% identical to one or more of the compounds or SEQ ID NOs, or a portion thereof, disclosed herein. In certain embodiments, compounds described herein are about 70%, 75%, 80%, 85%, 90%, 91%, 92%, 93%, 94%, 95%, 96%, 97%, 98%, or 99% identical, or any percentage between such values, to a particular nucleotide sequence, SEQ ID NO, or compound represented by a specific ION number, or portion thereof, in which the compounds comprise an oligonucleotide having one or more mismatched nucleobases. In certain such embodiments, the mismatch is at position 1, 2, 3, 4, 5, 6, 7, 8, 9, 10, 11, or 12 from the 5′-end of the oligonucleotide. In certain such embodiments, the mismatch is at position, 2, 3, 4, 5, 6, 7, 8, 9, 10, 11, or 12 from the 3′-end of the oligonucleotide.

[0218] In certain embodiments, compounds described herein comprise or consist of antisense compounds. In certain embodiments, a portion of the antisense compound is compared to an equal length portion of the target nucleic acid. In certain embodiments, an 8, 9, 10, 11, 12, 13, 14, 15, 16, 17, 18, 19, 20, 21, 22, 23, 24, or 25 nucleobase portion is compared to an equal length portion of the target nucleic acid.

[0219] In certain embodiments, compounds described herein comprise or consist of oligonucleotides. In certain embodiments, a portion of the oligonucleotide is compared to an equal length portion of the target nucleic acid. In certain embodiments, an 8, 9, 10, 11, 12, 13, 14, 15, 16, 17, 18, 19, 20, 21, 22, 23, 24, or 25 nucleobase portion is compared to an equal length portion of the target nucleic acid.

### Certain Modified Compounds

[0220] In certain embodiments, compounds described herein comprise or consist of oligonucleotides consisting of linked nucleosides. Oligonucleotides may be unmodified oligonucleotides (RNA or DNA) or may be modified oligonucleotides. Modified oligonucleotides comprise at least one modification relative to unmodified RNA or DNA (i.e., comprise at least one modified nucleoside (comprising a modified sugar moiety and/or a modified nucleobase) and/or at least one modified internucleoside linkage).

[0221] A. Modified Nucleosides Modified nucleosides comprise a modified sugar moiety or a modified nucleobase or both a modified sugar moiety and a modified nucleobase.

[0222] 1. Modified Sugar Moieties

[0223] In certain embodiments, sugar moieties are non-bicyclic modified sugar moieties. In certain embodiments, modified sugar moieties are bicyclic or tricyclic sugar moieties. In certain embodiments, modified sugar moieties are sugar surrogates. Such sugar surrogates may comprise one or more substitutions corresponding to those of other types of modified sugar moieties.

[0224] In certain embodiments, modified sugar moieties are non-bicyclic modified sugar moieties comprising a furanosyl ring with one or more acyclic substituent, including but not limited to substituents at the 2′, 4′, and/or 5′ positions. In certain embodiments one or more acyclic substituent of non-bicyclic modified sugar moieties is branched. Examples of 2′-substituent groups suitable for non-bicyclic modified sugar moieties include but are not limited to: 2′-F, 2′-OCH₃ (“OMe” or “O-methyl”), and 2′-O(CH₂)₂OCH₃, (“MOE”). In certain embodiments, 2′-substituent groups are selected from among: halo, allyl, amino, azido, SH, CN, OCN, CF₃, OCF₃, O—C₁-C₁₀ alkoxy, O—C₁-C₁₀ substituted alkoxy, O—C₁-C₁₀ alkyl, O—C₁-C₁₀ substituted alkyl, S-alkyl, N(Rₘ)-alkyl, O-alkenyl, S-alkenyl, N(Rₘ)-alkenyl, O-alkynyl, S-alkynyl, N(Rₘ)-alkynyl, O-alkylenyl-O-alkyl, alkynyl, alkaryl, aralkyl, O-alkaryl, O-aralkyl, O(CH₂)₂SCH₃, O(CH₂)₂ON(Rₘ)(Rₙ) or OCH₂C(═O)—N(Rₘ)(Rₙ), where each Rₘ and Rₙ is, independently, H, an amino protecting group, or substituted or unsubstituted C₁-C₁₀ alkyl, and the 2′-substituent groups described in Cook et al., U.S. Pat. No. 6,531,584; Cook et al., U.S. Pat. No. 5,859,221; and Cook et al., U.S. Pat. No. 6,005,087. Certain embodiments of these 2′-substituent groups can be further substituted with one or more substituent groups independently selected from among: hydroxyl, amino, alkoxy, carboxy, benzyl, phenyl, nitro (NO₂), thiol, thioalkoxy, thioalkyl, halogen, alkyl, aryl, alkenyl and alkynyl. Examples of 4′-substituent groups suitable for linearly non-bicyclic modified sugar moieties include but are not limited to alkoxy (e.g., methoxy), alkyl, and those described in Manoharan et al., WO 2015/106128. Examples of 5′-substituent groups suitable for non-bicyclic modified sugar moieties include but are not limited to: 5′-methyl (R or S), 5′-vinyl, and 5′-methoxy. In certain embodiments, non-bicyclic modified sugars comprise more than one non-bridging sugar substituent, for example, 2′-F-5′-methyl sugar moieties and the modified sugar moieties and modified nucleosides described in Migawa et al., US2010/190837 and Rajeev et al., US2013/0203836.

[0225] In certain embodiments, a 2′-substituted nucleoside or 2′-non-bicyclic modified nucleoside comprises a sugar moiety comprising a linear 2′-substituent group selected from: F, NH₂, N₃, OCF₃, OCH₃, O(CH₂)₃NH₂, CH₂CH═CH₂, OCH₂CH═CH₂, OCH₂CH₂OCH₃, O(CH₂)₂SCH₃, O(CH₂)₂ON(Rₘ)(Rₙ), O(CH₂)₂O(CH₂)₂N(CH₃)₂, and N-substituted acetamide (OCH₂C(═O)—N(Rₘ)(Rₙ)), where each Rₘ and Rₙ is, independently, H, an amino protecting group, or substituted or unsubstituted C₁-C₁₀ alkyl.

[0226] In certain embodiments, a 2′-substituted nucleoside or 2′-non-bicyclic modified nucleoside comprises a sugar moiety comprising a linear 2′-substituent group selected from: F, OCF₃, OCH₃, OCH₂CH₂OCH₃, O(CH₂)₂SCH₃, O(CH₂)₂ON(CH₃)₂, O(CH₂)₂O(CH₂)₂N(CH₃)₂, and OCH₂C(═O)—N(H)CH₃ (“NMA”).

[0227] In certain embodiments, a 2′-substituted nucleoside or 2′-non-bicyclic modified nucleoside comprises a sugar moiety comprising a linear 2′-substituent group selected from: F, OCH₃, and OCH₂CH₂OCH₃.

[0228] Nucleosides comprising modified sugar moieties, such as non-bicyclic modified sugar moieties, are referred to by the position(s) of the substitution(s) on the sugar moiety of the nucleoside. For example, nucleosides comprising 2′-substituted or 2-modified sugar moieties are referred to as 2′-substituted nucleosides or 2-modified nucleosides.

[0229] Certain modified sugar moieties comprise a bridging sugar substituent that forms a second ring resulting in a bicyclic sugar moiety. In certain such embodiments, the bicyclic sugar moiety comprises a bridge between the 4′ and the 2′ furanose ring atoms. Examples of such 4′ to 2′ bridging sugar substituents include but are not limited to: 4′-CH₂-2′, 4′-(CH₂)₂-2′, 4′-(CH₂)₃-2′, 4′-CH₂—O-2′ (“LNA”), 4′-CH₂—S-2′, 4′-(CH₂)₂—O-2′ (“ENA”), 4′-CH(CH₃)—O-2′ (referred to as “constrained ethyl” or “cEt” when in the S configuration), 4′-CH₂—O—CH₂-2′, 4′-CH₂—N(R)-2′, 4′-CH(CH₂OCH₃)—O-2′ (“constrained MOE” or “cMOE”) and analogs thereof (see, e.g., Seth et al., U.S. Pat. No. 7,399,845, Bhat et al., U.S. Pat. No. 7,569,686, Swayze et al., U.S. Pat. No. 7,741,457, and Swayze et al., U.S. Pat. No. 8,022,193), 4′-C(CH₃)(CH₃)—O-2′ and analogs thereof (see, e.g., Seth et al., U.S. Pat. No. 8,278,283), 4′-CH₂—N(OCH₃)-2′ and analogs thereof (see, e.g., Prakash et al., U.S. Pat. No. 8,278,425), 4′-CH₂—O—N(CH₃)-2′ (see, e.g., Allerson et al., U.S. Pat. No. 7,696,345 and Allerson et al., U.S. Pat. No. 8,124,745), 4′-CH₂—C(H)(CH₃)-2′ (see, e.g., Zhou, et al., J. Org. Chem., 2009, 74, 118-134), 4′-CH₂—C(═CH₂)-2′ and analogs thereof (see e.g., Seth et al., U.S. Pat. No. 8,278,426), 4′-C(RₐR_{b})—N(R)—O-2′, 4′-C(RₐR_{b})—O—N(R)-2′, 4′-CH₂—O—N(R)-2′, and 4′-CH₂—N(R)—O-2′, wherein each R, Rₐ, and R_{b} is, independently, H, a protecting group, or C₁-C₁₂ alkyl (see, e.g. Imanishi et al., U.S. Pat. No. 7,427,672).

[0230] In certain embodiments, such 4′ to 2′ bridges independently comprise from 1 to 4 linked groups independently selected from: —[C(Rₐ)(R_{b})]ₙ—, —[C(Rₐ)(R_{b})]ₙ—O—, —C(Rₐ)═C(R_{b})—, —C(Rₐ)═N—, —C(═NRₐ)—, —C(═O)—, —C(═S)—, —O—, —Si(Rₐ)₂—, —S(═O)ₓ—, and —N(Rₐ)—;
[0231] wherein:
[0232] x is 0, 1, or 2;
[0233] n is 1, 2, 3, or 4;
[0234] each Rₐ and R_{b} is, independently, H, a protecting group, hydroxyl, C₁-C₁₂ alkyl, substituted C₁-C₁₂ alkyl, C₂-C₁₂ alkenyl, substituted C₂-C₁₂ alkenyl, C₂-C₁₂ alkynyl, substituted C₂-C₁₂ alkynyl, C₅-C₂₀ aryl, substituted C₅-C₂₀ aryl, heterocycle radical, substituted heterocycle radical, heteroaryl, substituted heteroaryl, C₅-C₇ alicyclic radical, substituted C₅-C₇ alicyclic radical, halogen, OJ₁, NJ₁J₂, SJ₁, N₃, COOJ₁, acyl (C(═O)—H), substituted acyl, CN, sulfonyl (S(═O)₂-J₁), or sulfoxyl (S(═O)-J₁); and each J₁ and J₂ is, independently, H, C₁-C₁₂ alkyl, substituted C₁-C₁₂ alkyl, C₂-C₁₂ alkenyl, substituted C₂-C₁₂ alkenyl, C₂-C₁₂ alkynyl, substituted C₂-C₁₂ alkynyl, C₅-C₂₀ aryl, substituted C₅-C₂₀ aryl, acyl (C(═O)—H), substituted acyl, a heterocycle radical, a substituted heterocycle radical, C₁-C₁₂ aminoalkyl, substituted C₁-C₁₂ aminoalkyl, or a protecting group.

[0235] Additional bicyclic sugar moieties are known in the art, see, for example: Freier et al., Nucleic Acids Research, 1997, 25(22), 4429-4443, Albaek et al., J. Org. Chem., 2006, 71, 7731-7740, Singh et al., Chem. Commun., 1998, 4, 455-456; Koshkin et al., Tetrahedron, 1998, 54, 3607-3630; Wahlestedt et al., Proc. Natl. Acad. Sci. U.S.A, 2000, 97, 5633-5638; Kumar et al., Bioorg. Med. Chem. Lett., 1998, 8, 2219-2222; Singh et al., J. Org. Chem., 1998, 63, 10035-10039; Srivastava et al., J Am. Chem. Soc., 2007, 129, 8362-8379; Elayadi et al., Curr. Opinion Invens. Drugs, 2001, 2, 558-561; Braasch et al., Chem. Biol., 2001, 8, 1-7; Orum et al., Curr. Opinion Mol. Ther., 2001, 3, 239-243; Wengel et al., U.S. Pat. No. 7,053,207, Imanishi et al., U.S. Pat. No. 6,268,490, Imanishi et al. U.S. Pat. No. 6,770,748, Imanishi et al., U.S. RE44,779; Wengel et al., U.S. Pat. No. 6,794,499, Wengel et al., U.S. Pat. No. 6,670,461; Wengel et al., U.S. Pat. No. 7,034,133, Wengel et al., U.S. Pat. No. 8,080,644; Wengel et al., U.S. Pat. No. 8,034,909; Wengel et al., U.S. Pat. No. 8,153,365; Wengel et al., U.S. Pat. No. 7,572,582; and Ramasamy et al., U.S. Pat. No. 6,525,191, Torsten et al., WO 2004/106356, Wengel et al., WO 1999/014226; Seth et al., WO 2007/134181; Seth et al., U.S. Pat. No. 7,547,684; Seth et al., U.S. Pat. No. 7,666,854; Seth et al., U.S. Pat. No. 8,088,746; Seth et al., U.S. Pat. No. 7,750,131; Seth et al., U.S. Pat. No. 8,030,467; Seth et al., U.S. Pat. No. 8,268,980; Seth et al., U.S. Pat. No. 8,546,556; Seth et al., U.S. Pat. No. 8,530,640; Migawa et al., U.S. Pat. No. 9,012,421; Seth et al., U.S. Pat. No. 8,501,805; Allerson et al., US2008/0039618; and Migawa et al., US2015/0191727.

[0236] In certain embodiments, bicyclic sugar moieties and nucleosides incorporating such bicyclic sugar moieties are further defined by isomeric configuration. For example, an LNA nucleoside (described herein) may be in the α-L configuration or in the β-D configuration.

[chemical structure]

α-L-methyleneoxy (4′-CH₂—O-2′) or α-L-LNA bicyclic nucleosides have been incorporated into oligonucleotides that showed antisense activity (Frieden et al., Nucleic Acids Research, 2003, 21, 6365-6372). Herein, general descriptions of bicyclic nucleosides include both isomeric configurations. When the positions of specific bicyclic nucleosides (e.g., LNA or cEt) are identified in exemplified embodiments herein, they are in the β-D configuration, unless otherwise specified.

[0237] In certain embodiments, modified sugar moieties comprise one or more non-bridging sugar substituent and one or more bridging sugar substituent (e.g., 5′-substituted and 4′-2′ bridged sugars).

[0238] In certain embodiments, modified sugar moieties are sugar surrogates. In certain such embodiments, the oxygen atom of the sugar moiety is replaced, e.g., with a sulfur, carbon or nitrogen atom. In certain such embodiments, such modified sugar moieties also comprise bridging and/or non-bridging substituents as described herein. For example, certain sugar surrogates comprise a 4′-sulfur atom and a substitution at the 2′-position (see, e.g., Bhat et al., U.S. Pat. No. 7,875,733 and Bhat et al., U.S. Pat. No. 7,939,677) and/or the 5′ position.

[0239] In certain embodiments, sugar surrogates comprise rings having other than 5 atoms. For example, in certain embodiments, a sugar surrogate comprises a six-membered tetrahydropyran (“THP”). Such tetrahydropyrans may be further modified or substituted. Nucleosides comprising such modified tetrahydropyrans include but are not limited to hexitol nucleic acid (“HNA”), anitol nucleic acid (“ANA”), manitol nucleic acid (“MNA”) (see e.g., Leumann, C J. Bioorg. & Med. Chem. 2002, 10, 841-854), fluoro HNA:

[chemical structure]

(“F-HNA”, see e.g., Swayze et al., U.S. Pat. No. 8,088,904; Swayze et al., U.S. Pat. No. 8,440,803; and Swayze et al., U.S. Pat. No. 9,005,906, F-HNA can also be referred to as a F-THP or 3′-fluoro tetrahydropyran), and nucleosides comprising additional modified THP compounds having the formula:

[chemical structure]

wherein, independently, for each of said modified THP nucleoside:
[0240] Bx is a nucleobase moiety;
[0241] T₃ and T₄ are each, independently, an internucleoside linking group linking the modified THP nucleoside to the remainder of an oligonucleotide or one of T₃ and T₄ is an internucleoside linking group linking the modified THP nucleoside to the remainder of an oligonucleotide and the other of T₃ and T₄ is H, a hydroxyl protecting group, a linked conjugate group, or a 5′ or 3′-terminal group; q₁, q₂, q₃, q₄, q₅, q₆ and q₇ are each, independently, H, C₁-C₆ alkyl, substituted C₁-C₆ alkyl, C₂-C₆ alkenyl, substituted C₂-C₆ alkenyl, C₂-C₆ alkynyl, or substituted C₂-C₆ alkynyl; and each of R₁ and R₂ is independently selected from among: hydrogen, halogen, substituted or unsubstituted alkoxy, NJ₁J₂, SJ₁, N₃, OC(═X)J₁, OC(═X)NJ₁J₂, NJ₃C(═X)NJ₁J₂, and CN, wherein X is O, S or NJ₁, and each J₁, J₂, and J₃ is, independently, H or C₁-C₆ alkyl.

[0242] In certain embodiments, modified THP nucleosides are provided wherein q₁, q₂, q₃, q₄, q₅, q₆ and q₇ are each H. In certain embodiments, at least one of q₁, q₂, q₃, q₄, q₅, q₆ and q₇ is other than H. In certain embodiments, at least one of q₁, q₂, q₃, q₄, q₅, q₆ and q₇ is methyl. In certain embodiments, modified THP nucleosides are provided wherein one of R₁ and R₂ is F. In certain embodiments, R₁ is F and R₂ is H, in certain embodiments, R₁ is methoxy and R₂ is H, and in certain embodiments, R₁ is methoxyethoxy and R₂ is H.

[0243] In certain embodiments, sugar surrogates comprise rings having more than 5 atoms and more than one heteroatom. For example, nucleosides comprising morpholino sugar moieties and their use in oligonucleotides have been reported (see, e.g., Braasch et al., Biochemistry, 2002, 41, 4503-4510 and Summerton et al., U.S. Pat. No. 5,698,685; Summerton et al., U.S. Pat. No. 5,166,315; Summerton et al., U.S. Pat. No. 5,185,444; and Summerton et al., U.S. Pat. No. 5,034,506). As used here, the term “morpholino” means a sugar surrogate having the following structure:

[chemical structure]

In certain embodiments, morpholinos may be modified, for example by adding or altering various substituent groups from the above morpholino structure. Such sugar surrogates are referred to herein as “modified morpholinos.”

[0244] In certain embodiments, sugar surrogates comprise acyclic moieties. Examples of nucleosides and oligonucleotides comprising such acyclic sugar surrogates include but are not limited to: peptide nucleic acid (“PNA”), acyclic butyl nucleic acid (see, e.g., Kumar et al., Org. Biomol. Chem., 2013, 11, 5853-5865), and nucleosides and oligonucleotides described in Manoharan et al., US2013/130378.

[0245] Many other bicyclic and tricyclic sugar and sugar surrogate ring systems are known in the art that can be used in modified nucleosides.

[0246] 2. Modified Nucleobases

[0247] Nucleobase (or base) modifications or substitutions are structurally distinguishable from, yet functionally interchangeable with, naturally occurring or synthetic unmodified nucleobases. Both natural and modified nucleobases are capable of participating in hydrogen bonding. Such nucleobase modifications can impart nuclease stability, binding affinity or some other beneficial biological property to antisense compounds.

[0248] In certain embodiments, compounds described herein comprise modified oligonucleotides. In certain embodiments, modified oligonucleotides comprise one or more nucleoside comprising an unmodified nucleobase. In certain embodiments, modified oligonucleotides comprise one or more nucleoside comprising a modified nucleobase. In certain embodiments, modified oligonucleotides comprise one or more nucleoside that does not comprise a nucleobase, referred to as an abasic nucleoside.

[0249] In certain embodiments, modified nucleobases are selected from: 5-substituted pyrimidines, 6-azapyrimi¬dines, alkyl or alkynyl substituted pyrimidines, alkyl substituted purines, and N-2, N-6 and O-6 substituted purines. In certain embodiments, modified nucleobases are selected from: 2-aminopropyladenine, 5-hydroxymethyl cytosine, 5-methylcytosine, xanthine, hypoxanthine, 2-aminoadenine, 6-N-methylguanine, 6-N-methyladenine, 2-propyladenine, 2-thiouracil, 2-thiothymine and 2-thiocytosine, 5-propynyl (C≡C—CH3) uracil, 5-propynylcytosine, 6-azouracil, 6-azocytosine, 6-azothymine, 5-ribosyluracil (pseudouracil), 4-thiouracil, 8-halo, 8-amino, 8-thiol, 8-thioalkyl, 8-hydroxyl, 8-aza and other 8-substituted purines, 5-halo, particularly 5-bromo, 5-trifluoromethyl, 5-halouracil, and 5-halocytosine, 7-methylguanine, 7-methyladenine, 2-F-adenine, 2-aminoadenine, 7-deazaguanine, 7-deazaadenine, 3-deazaguanine, 3-deazaadenine, 6-N-benzoyladenine, 2-N-isobutyrylguanine, 4-N-benzoylcytosine, 4-N-benzoyluracil, 5-methyl 4-N-benzoylcytosine, 5-methyl 4-N-benzoyluracil, universal bases, hydrophobic bases, promiscuous bases, size-expanded bases, and fluorinated bases. Further modified nucleobases include tricyclic pyrimidines, such as 1,3-diazaphenoxazine-2-one, 1,3-diazaphenothiazine-2-one and 9-(2-aminoethoxy)-1,3-diazaphenoxazine-2-one (G-clamp). Modified nucleobases may also include those in which the purine or pyrimidine base is replaced with other heterocycles, for example 7-deaza-adenine, 7-deazaguanosine, 2-aminopyridine and 2-pyridone. Further nucleobases include those disclosed in Merigan et al., U.S. Pat. No. 3,687,808, those disclosed in The Concise Encyclopedia Of Polymer Science And Engineering, Kroschwitz, J. I., Ed., John Wiley & Sons, 1990, 858-859; Englisch et al., Angewandte Chemie, International Edition, 1991, 30, 613; Sanghvi, Y. S., Chapter 15, Antisense Research and Applications, Crooke, S. T. and Lebleu, B., Eds., CRC Press, 1993, 273-288; and those disclosed in Chapters 6 and 15, Antisense Drug Technology, Crooke S. T., Ed., CRC Press, 2008, 163-166 and 442-443.

[0250] Publications that teach the preparation of certain of the above noted modified nucleobases as well as other modified nucleobases include without limitation, Manoharan et al., US2003/0158403, Manoharan et al., US2003/0175906; Dinh et al., U.S. Pat. No. 4,845,205; Spielvogel et al., U.S. Pat. No. 5,130,302; Rogers et al., U.S. Pat. No. 5,134,066; Bischofberger et al., U.S. Pat. No. 5,175,273; Urdea et al., U.S. Pat. No. 5,367,066; Benner et al., U.S. Pat. No. 5,432,272; Matteucci et al., U.S. Pat. No. 5,434,257; Gmeiner et al., U.S. Pat. No. 5,457,187; Cook et al., U.S. Pat. No. 5,459,255; Froehler et al., U.S. Pat. No. 5,484,908; Matteucci et al., U.S. Pat. No. 5,502,177; Hawkins et al., U.S. Pat. No. 5,525,711; Haralambidis et al., U.S. Pat. No. 5,552,540; Cook et al., U.S. Pat. No. 5,587,469; Froehler et al., U.S. Pat. No. 5,594,121; Switzer et al., U.S. Pat. No. 5,596,091; Cook et al., U.S. Pat. No. 5,614,617; Froehler et al., U.S. Pat. No. 5,645,985; Cook et al., U.S. Pat. No. 5,681,941; Cook et al., U.S. Pat. No. 5,811,534; Cook et al., U.S. Pat. No. 5,750,692; Cook et al., U.S. Pat. No. 5,948,903; Cook et al., U.S. Pat. No. 5,587,470; Cook et al., U.S. Pat. No. 5,457,191; Matteucci et al., U.S. Pat. No. 5,763,588; Froehler et al., U.S. Pat. No. 5,830,653; Cook et al., U.S. Pat. No. 5,808,027; Cook et al., U.S. Pat. No. 6,166,199; and Matteucci et al., U.S. Pat. No. 6,005,096.

[0251] In certain embodiments, compounds targeted to a PCSK9 nucleic acid comprise one or more modified nucleobases. In certain embodiments, the modified nucleobase is 5-methylcytosine. In certain embodiments, each cytosine is a 5-methylcytosine.

[0252] 3. Modified Internucleoside Linkages

[0253] The naturally occurring internucleoside linkage of RNA and DNA is a 3′ to 5′ phosphodiester linkage In certain embodiments, compounds described herein having one or more modified, i.e. non-naturally occurring, internucleoside linkages are often selected over compounds having naturally occurring internucleoside linkages because of desirable properties such as, for example, enhanced cellular uptake, enhanced affinity for target nucleic acids, and increased stability in the presence of nucleases.

[0254] In certain embodiments, compounds targeted to a PCSK9 nucleic acid comprise one or more modified internucleoside linkages. In certain embodiments, the modified internucleoside linkages are phosphorothioate linkages. In certain embodiments, each internucleoside linkage of an antisense compound is a phosphorothioate internucleoside linkage.

[0255] In certain embodiments, compounds described herein comprise oligonucleotides. Oligonucleotides having modified internucleoside linkages include internucleoside linkages that retain a phosphorus atom as well as internucleoside linkages that do not have a phosphorus atom. Representative phosphorus containing internucleoside linkages include, but are not limited to, phosphodiesters, phosphotriesters, methylphosphonates, phosphoramidate, and phosphorothioates. Methods of preparation of phosphorous-containing and non-phosphorous-containing linkages are well known.

[0256] In certain embodiments, nucleosides of modified oligonucleotides may be linked together using any internucleoside linkage. The two main classes of internucleoside linking groups are defined by the presence or absence of a phosphorus atom. Representative phosphorus-containing internucleoside linkages include but are not limited to phosphates, which contain a phosphodiester bond (“P═O”) (also referred to as unmodified or naturally occurring linkages), phosphotriesters, methylphosphonates, phosphoramidates, and phosphorothioates (“P═S”), and phosphorodithioates (“HS—P═S”). Representative non-phosphorus containing internucleoside linking groups include but are not limited to methylenemethylimino (—CH2-N(CH3)-O—CH2-), thiodiester, thionocarbamate (—O—C(═O)(NH)—S—); siloxane (—O—SiH2-O—); and N,N′-dimethylhydrazine (-CH2-N(CH3)-N(CH3)-). Modified internucleoside linkages, compared to naturally occurring phosphate linkages, can be used to alter, typically increase, nuclease resistance of the oligonucleotide. In certain embodiments, internucleoside linkages having a chiral atom can be prepared as a racemic mixture, or as separate enantiomers. Representative chiral internucleoside linkages include but are not limited to alkylphosphonates and phosphorothioates. Methods of preparation of phosphorous-containing and non-phosphorous-containing internucleoside linkages are well known to those skilled in the art.

[0257] Neutral internucleoside linkages include, without limitation, phosphotriesters, methylphosphonates, MMI (3′-CH2-N(CH3)-O-5′), amide-3 (3′-CH2-C(═O)—N(H)-5′), amide-4 (3′-CH2-N(H)—C(═O)-5′), formacetal (3′-O—CH2-O-5′), methoxypropyl, and thioformacetal (3′-S—CH2-O-5′). Further neutral internucleoside linkages include nonionic linkages comprising siloxane (dialkylsiloxane), carboxylate ester, carboxamide, sulfide, sulfonate ester and amides (See for example: Carbohydrate Modifications in Antisense Research; Y. S. Sanghvi and P. D. Cook, Eds., ACS Symposium Series 580; Chapters 3 and 4, 40-65). Further neutral internucleoside linkages include nonionic linkages comprising mixed N, O, S and CH2 component parts.

[0258] In certain embodiments, oligonucleotides comprise modified internucleoside linkages arranged along the oligonucleotide or region thereof in a defined pattern or modified internucleoside linkage motif. In certain embodiments, internucleoside linkages are arranged in a gapped motif. In such embodiments, the internucleoside linkages in each of two wing regions are different from the internucleoside linkages in the gap region. In certain embodiments the internucleoside linkages in the wings are phosphodiester and the internucleoside linkages in the gap are phosphorothioate. The nucleoside motif is independently selected, so such oligonucleotides having a gapped internucleoside linkage motif may or may not have a gapped nucleoside motif and if it does have a gapped nucleoside motif, the wing and gap lengths may or may not be the same.

[0259] In certain embodiments, oligonucleotides comprise a region having an alternating internucleoside linkage motif. In certain embodiments, oligonucleotides comprise a region of uniformly modified internucleoside linkages. In certain such embodiments, the oligonucleotide comprises a region that is uniformly linked by phosphorothioate internucleoside linkages. In certain embodiments, the oligonucleotide is uniformly linked by phosphorothioate. In certain embodiments, each internucleoside linkage of the oligonucleotide is selected from phosphodiester and phosphorothioate. In certain embodiments, each internucleoside linkage of the oligonucleotide is selected from phosphodiester and phosphorothioate and at least one internucleoside linkage is phosphorothioate.

[0260] In certain embodiments, the oligonucleotide comprises at least 6 phosphorothioate internucleoside linkages. In certain embodiments, the oligonucleotide comprises at least 8 phosphorothioate internucleoside linkages. In certain embodiments, the oligonucleotide comprises at least 10 phosphorothioate internucleoside linkages. In certain embodiments, the oligonucleotide comprises at least one block of at least 6 consecutive phosphorothioate internucleoside linkages. In certain embodiments, the oligonucleotide comprises at least one block of at least 8 consecutive phosphorothioate internucleoside linkages. In certain embodiments, the oligonucleotide comprises at least one block of at least 10 consecutive phosphorothioate internucleoside linkages. In certain embodiments, the oligonucleotide comprises at least block of at least one 12 consecutive phosphorothioate internucleoside linkages. In certain such embodiments, at least one such block is located at the 3′ end of the oligonucleotide. In certain such embodiments, at least one such block is located within 3 nucleosides of the 3′ end of the oligonucleotide.

[0261] In certain embodiments, oligonucleotides comprise one or more methylphosponate linkages. In certain embodiments, oligonucleotides having a gapmer nucleoside motif comprise a linkage motif comprising all phosphorothioate linkages except for one or two methylphosponate linkages. In certain embodiments, one methylphosponate linkage is in the central gap of an oligonucleotide having a gapmer nucleoside motif.

[0262] In certain embodiments, it is desirable to arrange the number of phosphorothioate internucleoside linkages and phosphodiester internucleoside linkages to maintain nuclease resistance. In certain embodiments, it is desirable to arrange the number and position of phosphorothioate internucleoside linkages and the number and position of phosphodiester internucleoside linkages to maintain nuclease resistance. In certain embodiments, the number of phosphorothioate internucleoside linkages may be decreased and the number of phosphodiester internucleoside linkages may be increased. In certain embodiments, the number of phosphorothioate internucleoside linkages may be decreased and the number of phosphodiester internucleoside linkages may be increased while still maintaining nuclease resistance. In certain embodiments it is desirable to decrease the number of phosphorothioate internucleoside linkages while retaining nuclease resistance. In certain embodiments it is desirable to increase the number of phosphodiester internucleoside linkages while retaining nuclease resistance.

[0263] 4. Certain Motifs

[0264] In certain embodiments, compounds described herein comprise oligonucleotides. Oligonucleotides can have a motif, e.g. a pattern of unmodified and/or modified sugar moieties, nucleobases, and/or internucleoside linkages. In certain embodiments, modified oligonucleotides comprise one or more modified nucleoside comprising a modified sugar. In certain embodiments, modified oligonucleotides comprise one or more modified nucleosides comprising a modified nucleobase. In certain embodiments, modified oligonucleotides comprise one or more modified internucleoside linkage. In such embodiments, the modified, unmodified, and differently modified sugar moieties, nucleobases, and/or internucleoside linkages of a modified oligonucleotide define a pattern or motif. In certain embodiments, the patterns of sugar moieties, nucleobases, and internucleoside linkages are each independent of one another. Thus, a modified oligonucleotide may be described by its sugar motif, nucleobase motif and/or internucleoside linkage motif (as used herein, nucleobase motif describes the modifications to the nucleobases independent of the sequence of nucleobases).

[0265] a. Certain Sugar Motifs

[0266] In certain embodiments, compounds described herein comprise oligonucleotides. In certain embodiments, oligonucleotides comprise one or more type of modified sugar and/or unmodified sugar moiety arranged along the oligonucleotide or region thereof in a defined pattern or sugar motif. In certain instances, such sugar motifs include but are not limited to any of the sugar modifications discussed herein.

[0267] In certain embodiments, modified oligonucleotides comprise or consist of a region having a gapmer motif, which comprises two external regions or “wings” and a central or internal region or “gap.” The three regions of a gapmer motif (the 5′-wing, the gap, and the 3′-wing) form a contiguous sequence of nucleosides wherein at least some of the sugar moieties of the nucleosides of each of the wings differ from at least some of the sugar moieties of the nucleosides of the gap. Specifically, at least the sugar moieties of the nucleosides of each wing that are closest to the gap (the 3′-most nucleoside of the 5′-wing and the 5′-most nucleoside of the 3′-wing) differ from the sugar moiety of the neighboring gap nucleosides, thus defining the boundary between the wings and the gap (i.e., the wing/gap junction). In certain embodiments, the sugar moieties within the gap are the same as one another. In certain embodiments, the gap includes one or more nucleoside having a sugar moiety that differs from the sugar moiety of one or more other nucleosides of the gap. In certain embodiments, the sugar motifs of the two wings are the same as one another (symmetric gapmer). In certain embodiments, the sugar motif of the 5′-wing differs from the sugar motif of the 3′-wing (asymmetric gapmer).

[0268] In certain embodiments, the wings of a gapmer comprise 1-5 nucleosides. In certain embodiments, the wings of a gapmer comprise 2-5 nucleosides. In certain embodiments, the wings of a gapmer comprise 3-5 nucleosides. In certain embodiments, the nucleosides of a gapmer are all modified nucleosides.

[0269] In certain embodiments, the gap of a gapmer comprises 7-12 nucleosides. In certain embodiments, the gap of a gapmer comprises 7-10 nucleosides. In certain embodiments, the gap of a gapmer comprises 8-10 nucleosides. In certain embodiments, the gap of a gapmer comprises 10 nucleosides. In certain embodiment, each nucleoside of the gap of a gapmer is an unmodified 2′-deoxy nucleoside.

[0270] In certain embodiments, the gapmer is a deoxy gapmer. In such embodiments, the nucleosides on the gap side of each wing/gap junction are unmodified 2′-deoxy nucleosides and the nucleosides on the wing sides of each wing/gap junction are modified nucleosides. In certain such embodiments, each nucleoside of the gap is an unmodified 2′-deoxy nucleoside. In certain such embodiments, each nucleoside of each wing is a modified nucleoside.

[0271] In certain embodiments, a modified oligonucleotide has a fully modified sugar motif wherein each nucleoside of the modified oligonucleotide comprises a modified sugar moiety. In certain embodiments, modified oligonucleotides comprise or consist of a region having a fully modified sugar motif wherein each nucleoside of the region comprises a modified sugar moiety. In certain embodiments, modified oligonucleotides comprise or consist of a region having a fully modified sugar motif, wherein each nucleoside within the fully modified region comprises the same modified sugar moiety, referred to herein as a uniformly modified sugar motif. In certain embodiments, a fully modified oligonucleotide is a uniformly modified oligonucleotide. In certain embodiments, each nucleoside of a uniformly modified comprises the same 2′-modification.

[0272] In certain embodiments, a modified oligonucleotide can comprise a sugar motif described in Swayze et al., US2010/0197762; Freier et al., US2014/0107330; Freier et al., US2015/0184153; and Seth et al., US2015/0267195, each of which is incorporated by reference in its entirety herein.

[0273] b. Certain Nucleobase Motifs

[0274] In certain embodiments, compounds described herein comprise oligonucleotides. In certain embodiments, oligonucleotides comprise modified and/or unmodified nucleobases arranged along the oligonucleotide or region thereof in a defined pattern or motif. In certain embodiments, each nucleobase is modified. In certain embodiments, none of the nucleobases are modified. In certain embodiments, each purine or each pyrimidine is modified. In certain embodiments, each adenine is modified. In certain embodiments, each guanine is modified. In certain embodiments, each thymine is modified. In certain embodiments, each uracil is modified. In certain embodiments, each cytosine is modified. In certain embodiments, some or all of the cytosine nucleobases in a modified oligonucleotide are 5-methylcytosines.

[0275] In certain embodiments, modified oligonucleotides comprise a block of modified nucleobases. In certain such embodiments, the block is at the 3′-end of the oligonucleotide. In certain embodiments the block is within 3 nucleosides of the 3′-end of the oligonucleotide. In certain embodiments, the block is at the 5′-end of the oligonucleotide. In certain embodiments the block is within 3 nucleosides of the 5′-end of the oligonucleotide.

[0276] In certain embodiments, oligonucleotides having a gapmer motif comprise a nucleoside comprising a modified nucleobase. In certain such embodiments, one nucleoside comprising a modified nucleobase is in the central gap of an oligonucleotide having a gapmer motif. In certain such embodiments, the sugar moiety of said nucleoside is a 2′-deoxyribosyl moiety. In certain embodiments, the modified nucleobase is selected from: a 2-thiopyrimidine and a 5-propynepyrimidine.

[0277] c. Certain Internucleoside Linkage Motifs

[0278] In certain embodiments, compounds described herein comprise oligonucleotides. In certain embodiments, oligonucleotides comprise modified and/or unmodified internucleoside linkages arranged along the oligonucleotide or region thereof in a defined pattern or motif. In certain embodiments, essentially each internucleoside linking group is a phosphate internucleoside linkage (P═O). In certain embodiments, each internucleoside linking group of a modified oligonucleotide is a phosphorothioate (P═S). In certain embodiments, each internucleoside linking group of a modified oligonucleotide is independently selected from a phosphorothioate and phosphate internucleoside linkage. In certain embodiments, the sugar motif of a modified oligonucleotide is a gapmer and the internucleoside linkages within the gap are all modified. In certain such embodiments, some or all of the internucleoside linkages in the wings are unmodified phosphate linkages. In certain embodiments, the terminal internucleoside linkages are modified.

[0279] 5. Certain Modified Oligonucleotides

[0280] In certain embodiments, compounds described herein comprise modified oligonucleotides. In certain embodiments, the above modifications (sugar, nucleobase, internucleoside linkage) are incorporated into a modified oligonucleotide. In certain embodiments, modified oligonucleotides are characterized by their modification, motifs, and overall lengths. In certain embodiments, such parameters are each independent of one another. Thus, unless otherwise indicated, each internucleoside linkage of an oligonucleotide having a gapmer sugar motif may be modified or unmodified and may or may not follow the gapmer modification pattern of the sugar modifications. For example, the internucleoside linkages within the wing regions of a sugar gapmer may be the same or different from one another and may be the same or different from the internucleoside linkages of the gap region of the sugar motif. Likewise, such gapmer oligonucleotides may comprise one or more modified nucleobase independent of the gapmer pattern of the sugar modifications. Furthermore, in certain instances, an oligonucleotide is described by an overall length or range and by lengths or length ranges of two or more regions (e.g., a regions of nucleosides having specified sugar modifications), in such circumstances it may be possible to select numbers for each range that result in an oligonucleotide having an overall length falling outside the specified range. In such circumstances, both elements must be satisfied. For example, in certain embodiments, a modified oligonucleotide consists of 15-20 linked nucleosides and has a sugar motif consisting of three regions, A, B, and C, wherein region A consists of 2-6 linked nucleosides having a specified sugar motif, region B consists of 6-10 linked nucleosides having a specified sugar motif, and region C consists of 2-6 linked nucleosides having a specified sugar motif. Such embodiments do not include modified oligonucleotides where A and C each consist of 6 linked nucleosides and B consists of 10 linked nucleosides (even though those numbers of nucleosides are permitted within the requirements for A, B, and C) because the overall length of such oligonucleotide is 22, which exceeds the upper limit of the overall length of the modified oligonucleotide (20). Herein, if a description of an oligonucleotide is silent with respect to one or more parameter, such parameter is not limited. Thus, a modified oligonucleotide described only as having a gapmer sugar motif without further description may have any length, internucleoside linkage motif, and nucleobase motif Unless otherwise indicated, all modifications are independent of nucleobase sequence.

### Certain Conjugated Compounds

[0281] In certain embodiments, the compounds described herein comprise or consist of an oligonucleotide (modified or unmodified) and optionally one or more conjugate groups and/or terminal groups. Conjugate groups consist of one or more conjugate moiety and a conjugate linker which links the conjugate moiety to the oligonucleotide. Conjugate groups may be attached to either or both ends of an oligonucleotide and/or at any internal position. In certain embodiments, conjugate groups are attached to the 2′-position of a nucleoside of a modified oligonucleotide. In certain embodiments, conjugate groups that are attached to either or both ends of an oligonucleotide are terminal groups. In certain such embodiments, conjugate groups or terminal groups are attached at the 3′ and/or 5′-end of oligonucleotides. In certain such embodiments, conjugate groups (or terminal groups) are attached at the 3′-end of oligonucleotides. In certain embodiments, conjugate groups are attached near the 3′-end of oligonucleotides. In certain embodiments, conjugate groups (or terminal groups) are attached at the 5′-end of oligonucleotides. In certain embodiments, conjugate groups are attached near the 5′-end of oligonucleotides.

[0282] In certain embodiments, the oligonucleotide is modified. In certain embodiments, the oligonucleotide of a compound has a nucleobase sequence that is complementary to a target nucleic acid. In certain embodiments, oligonucleotides are complementary to a messenger RNA (mRNA). In certain embodiments, oligonucleotides are complementary to a sense transcript.

[0283] Examples of terminal groups include but are not limited to conjugate groups, capping groups, phosphate moieties, protecting groups, modified or unmodified nucleosides, and two or more nucleosides that are independently modified or unmodified.

[0284] A. Certain Conjugate Groups

[0285] In certain embodiments, oligonucleotides are covalently attached to one or more conjugate groups. In certain embodiments, conjugate groups modify one or more properties of the attached oligonucleotide, including but not limited to pharmacodynamics, pharmacokinetics, stability, binding, absorption, tissue distribution, cellular distribution, cellular uptake, charge and clearance In certain embodiments, conjugate groups impart a new property on the attached oligonucleotide, e.g., fluorophores or reporter groups that enable detection of the oligonucleotide.

[0286] Certain conjugate groups and conjugate moieties have been described previously, for example: cholesterol moiety (Letsinger et al., Proc. Natl. Acad. Sci. USA, 1989, 86, 6553-6556), cholic acid (Manoharan et al., Bioorg. Med. Chem. Lett., 1994, 4, 1053-1060), a thioether, e.g., hexyl-S-tritylthiol (Manoharan et al., Ann. N.Y. Acad. Sci., 1992, 660, 306-309; Manoharan et al., Bioorg. Med. Chem. Lett., 1993, 3, 2765-2770), a thiocholesterol (Oberhauser et al., Nucl. Acids Res., 1992, 20, 533-538), an aliphatic chain, e.g., do-decan-diol or undecyl residues (Saison-Behmoaras et al., EMBO J., 1991, 10, 1111-1118; Kabanov et al., FEBS Lett., 1990, 259, 327-330; Svinarchuk et al., Biochimie, 1993, 75, 49-54), a phospholipid, e.g., di-hexadecyl-rac-glycerol or triethyl-ammonium 1,2-di-O-hexadecyl-rac-glycero-3-H-phosphonate (Manoharan et al., Tetrahedron Lett., 1995, 36, 3651-3654; Shea et al., Nucl. Acids Res., 1990, 18, 3777-3783), a polyamine or a polyethylene glycol chain (Manoharan et al., Nucleosides & Nucleotides, 1995, 14, 969-973), or adamantane acetic, a palmityl moiety (Mishra et al., Biochim. Biophys. Acta, 1995, 1264, 229-237), an octadecylamine or hexylamino-carbonyl-oxycholesterol moiety (Crooke et al., J. Pharmacol. Exp. Ther., 1996, i, 923-937),_a tocopherol group (Nishina et al., Molecular Therapy Nucleic Acids, 2015, 4, e220; doi: 10.1038/mtna.2014.72 and Nishina et al., Molecular Therapy, 2008, 16, 734-740), or a GalNAc cluster (e.g., WO2014/179620).

[0287] 1. Conjugate Moieties

[0288] Conjugate moieties include, without limitation, intercalators, reporter molecules, polyamines, polyamides, peptides, carbohydrates (e.g., GalNAc), vitamin moieties, polyethylene glycols, thioethers, polyethers, cholesterols, thiocholesterols, cholic acid moieties, folate, lipids, phospholipids, biotin, phenazine, phenanthridine, anthraquinone, adamantane, acridine, fluoresceins, rhodamines, coumarins, fluorophores, and dyes.

[0289] In certain embodiments, a conjugate moiety comprises an active drug substance, for example, aspirin, warfarin, phenylbutazone, ibuprofen, suprofen, fen-bufen, ketoprofen, (S)-(+)-pranoprofen, carprofen, dansylsarcosine, 2,3,5-triiodobenzoic acid, fingolimod, flufenamic acid, folinic acid, a benzothiadiazide, chlorothiazide, a diazepine, indo-methicin, a barbiturate, a cephalosporin, a sulfa drug, an antidiabetic, an antibacterial or an antibiotic.

[0290] 2. Conjugate Linkers

[0291] Conjugate moieties are attached to oligonucleotides through conjugate linkers. In certain compounds, a conjugate group is a single chemical bond (i.e. conjugate moiety is attached to an oligonucleotide via a conjugate linker through a single bond). In certain embodiments, the conjugate linker comprises a chain structure, such as a hydrocarbyl chain, or an oligomer of repeating units such as ethylene glycol, nucleosides, or amino acid units.

[0292] In certain embodiments, a conjugate linker comprises one or more groups selected from alkyl, amino, oxo, amide, disulfide, polyethylene glycol, ether, thioether, and hydroxylamino. In certain such embodiments, the conjugate linker comprises groups selected from alkyl, amino, oxo, amide and ether groups. In certain embodiments, the conjugate linker comprises groups selected from alkyl and amide groups. In certain embodiments, the conjugate linker comprises groups selected from alkyl and ether groups. In certain embodiments, the conjugate linker comprises at least one phosphorus moiety. In certain embodiments, the conjugate linker comprises at least one phosphate group. In certain embodiments, the conjugate linker includes at least one neutral linking group.

[0293] In certain embodiments, conjugate linkers, including the conjugate linkers described above, are bifunctional linking moieties, e.g., those known in the art to be useful for attaching conjugate groups to parent compounds, such as the oligonucleotides provided herein. In general, a bifunctional linking moiety comprises at least two functional groups. One of the functional groups is selected to bind to a particular site on a compound and the other is selected to bind to a conjugate group. Examples of functional groups used in a bifunctional linking moiety include but are not limited to electrophiles for reacting with nucleophilic groups and nucleophiles for reacting with electrophilic groups. In certain embodiments, bifunctional linking moieties comprise one or more groups selected from amino, hydroxyl, carboxylic acid, thiol, alkyl, alkenyl, and alkynyl.

[0294] Examples of conjugate linkers include but are not limited to pyrrolidine, 8-amino-3,6-dioxaoctanoic acid (ADO), succinimidyl 4-(N-maleimidomethyl) cyclohexane-1-carboxylate (SMCC) and 6-aminohexanoic acid (AHEX or AHA). Other conjugate linkers include but are not limited to substituted or unsubstituted C₁-C₁₀ alkyl, substituted or unsubstituted C₂-C₁₀ alkenyl or substituted or unsubstituted C₂-C₁₀ alkynyl, wherein a nonlimiting list of preferred substituent groups includes hydroxyl, amino, alkoxy, carboxy, benzyl, phenyl, nitro, thiol, thioalkoxy, halogen, alkyl, aryl, alkenyl and alkynyl.

[0295] In certain embodiments, conjugate linkers comprise 1-10 linker-nucleosides. In certain embodiments, such linker-nucleosides are modified nucleosides. In certain embodiments such linker-nucleosides comprise a modified sugar moiety. In certain embodiments, linker-nucleosides are unmodified. In certain embodiments, linker-nucleosides comprise an optionally protected heterocyclic base selected from a purine, substituted purine, pyrimidine or substituted pyrimidine. In certain embodiments, a cleavable moiety is a nucleoside selected from uracil, thymine, cytosine, 4-N-benzoylcytosine, 5-methylcytosine, 4-N-benzoyl-5-methylcytosine, adenine, 6-N-benzoyladenine, guanine and 2-N-isobutyrylguanine. It is typically desirable for linker-nucleosides to be cleaved from the compound after it reaches a target tissue. Accordingly, linker-nucleosides are typically linked to one another and to the remainder of the compound through cleavable bonds. In certain embodiments, such cleavable bonds are phosphodiester bonds.

[0296] Herein, linker-nucleosides are not considered to be part of the oligonucleotide. Accordingly, in embodiments in which a compound comprises an oligonucleotide consisting of a specified number or range of linked nucleosides and/or a specified percent complementarity to a reference nucleic acid and the compound also comprises a conjugate group comprising a conjugate linker comprising linker-nucleosides, those linker-nucleosides are not counted toward the length of the oligonucleotide and are not used in determining the percent complementarity of the oligonucleotide for the reference nucleic acid. For example, a compound may comprise (1) a modified oligonucleotide consisting of 8-30 nucleosides and (2) a conjugate group comprising 1-10 linker-nucleosides that are contiguous with the nucleosides of the modified oligonucleotide. The total number of contiguous linked nucleosides in such a compound is more than 30. Alternatively, an compound may comprise a modified oligonucleotide consisting of 8-30 nucleosides and no conjugate group. The total number of contiguous linked nucleosides in such a compound is no more than 30. Unless otherwise indicated conjugate linkers comprise no more than 10 linker-nucleosides. In certain embodiments, conjugate linkers comprise no more than 5 linker-nucleosides. In certain embodiments, conjugate linkers comprise no more than 3 linker-nucleosides. In certain embodiments, conjugate linkers comprise no more than 2 linker-nucleosides. In certain embodiments, conjugate linkers comprise no more than 1 linker-nucleoside.

[0297] In certain embodiments, it is desirable for a conjugate group to be cleaved from the oligonucleotide. For example, in certain circumstances compounds comprising a particular conjugate moiety are better taken up by a particular cell type, but once the compound has been taken up, it is desirable that the conjugate group be cleaved to release the unconjugated or parent oligonucleotide. Thus, certain conjugate may comprise one or more cleavable moieties, typically within the conjugate linker. In certain embodiments, a cleavable moiety is a cleavable bond. In certain embodiments, a cleavable moiety is a group of atoms comprising at least one cleavable bond. In certain embodiments, a cleavable moiety comprises a group of atoms having one, two, three, four, or more than four cleavable bonds. In certain embodiments, a cleavable moiety is selectively cleaved inside a cell or subcellular compartment, such as a lysosome. In certain embodiments, a cleavable moiety is selectively cleaved by endogenous enzymes, such as nucleases.

[0298] In certain embodiments, a cleavable bond is selected from among: an amide, an ester, an ether, one or both esters of a phosphodiester, a phosphate ester, a carbamate, or a disulfide. In certain embodiments, a cleavable bond is one or both of the esters of a phosphodiester. In certain embodiments, a cleavable moiety comprises a phosphate or phosphodiester. In certain embodiments, the cleavable moiety is a phosphate linkage between an oligonucleotide and a conjugate moiety or conjugate group.

[0299] In certain embodiments, a cleavable moiety comprises or consists of one or more linker-nucleosides. In certain such embodiments, one or more linker-nucleosides are linked to one another and/or to the remainder of the compound through cleavable bonds. In certain embodiments, such cleavable bonds are unmodified phosphodiester bonds. In certain embodiments, a cleavable moiety is 2′-deoxy nucleoside that is attached to either the 3′ or 5′-terminal nucleoside of an oligonucleotide by a phosphate internucleoside linkage and covalently attached to the remainder of the conjugate linker or conjugate moiety by a phosphate or phosphorothioate linkage. In certain such embodiments, the cleavable moiety is 2′-deoxyadenosine.

[0300] 3. Certain Cell-Targeting Conjugate Moieties

[0301] In certain embodiments, a conjugate group comprises a cell-targeting conjugate moiety. In certain embodiments, a conjugate group has the general formula:

[chemical structure]

[0302] wherein n is from 1 to about 3, m is 0 when n is 1, m is 1 when n is 2 or greater, j is 1 or 0, and k is 1 or 0.

[0303] In certain embodiments, n is 1, j is 1 and k is 0. In certain embodiments, n is 1, j is 0 and k is 1. In certain embodiments, n is 1, j is 1 and k is 1. In certain embodiments, n is 2, j is 1 and k is 0. In certain embodiments, n is 2, j is 0 and k is 1. In certain embodiments, n is 2, j is 1 and k is 1. In certain embodiments, n is 3, j is 1 and k is 0. In certain embodiments, n is 3, j is 0 and k is 1. In certain embodiments, n is 3, j is 1 and k is 1.

[0304] In certain embodiments, conjugate groups comprise cell-targeting moieties that have at least one tethered ligand. In certain embodiments, cell-targeting moieties comprise two tethered ligands covalently attached to a branching group. In certain embodiments, cell-targeting moieties comprise three tethered ligands covalently attached to a branching group.

[0305] In certain embodiments, the cell-targeting moiety comprises a branching group comprising one or more groups selected from alkyl, amino, oxo, amide, disulfide, polyethylene glycol, ether, thioether and hydroxylamino groups. In certain embodiments, the branching group comprises a branched aliphatic group comprising groups selected from alkyl, amino, oxo, amide, disulfide, polyethylene glycol, ether, thioether and hydroxylamino groups. In certain such embodiments, the branched aliphatic group comprises groups selected from alkyl, amino, oxo, amide and ether groups. In certain such embodiments, the branched aliphatic group comprises groups selected from alkyl, amino and ether groups. In certain such embodiments, the branched aliphatic group comprises groups selected from alkyl and ether groups. In certain embodiments, the branching group comprises a mono or polycyclic ring system.

[0306] In certain embodiments, each tether of a cell-targeting moiety comprises one or more groups selected from alkyl, substituted alkyl, ether, thioether, disulfide, amino, oxo, amide, phosphodiester, and polyethylene glycol, in any combination. In certain embodiments, each tether is a linear aliphatic group comprising one or more groups selected from alkyl, ether, thioether, disulfide, amino, oxo, amide, and polyethylene glycol, in any combination. In certain embodiments, each tether is a linear aliphatic group comprising one or more groups selected from alkyl, phosphodiester, ether, amino, oxo, and amide, in any combination. In certain embodiments, each tether is a linear aliphatic group comprising one or more groups selected from alkyl, ether, amino, oxo, and amid, in any combination. In certain embodiments, each tether is a linear aliphatic group comprising one or more groups selected from alkyl, amino, and oxo, in any combination. In certain embodiments, each tether is a linear aliphatic group comprising one or more groups selected from alkyl and oxo, in any combination. In certain embodiments, each tether is a linear aliphatic group comprising one or more groups selected from alkyl and phosphodiester, in any combination. In certain embodiments, each tether comprises at least one phosphorus linking group or neutral linking group. In certain embodiments, each tether comprises a chain from about 6 to about 20 atoms in length. In certain embodiments, each tether comprises a chain from about 10 to about 18 atoms in length. In certain embodiments, each tether comprises about 10 atoms in chain length.

[0307] In certain embodiments, each ligand of a cell-targeting moiety has an affinity for at least one type of receptor on a target cell. In certain embodiments, each ligand has an affinity for at least one type of receptor on the surface of a mammalian liver cell. In certain embodiments, each ligand has an affinity for the hepatic asialoglycoprotein receptor (ASGP-R). In certain embodiments, each ligand is a carbohydrate. In certain embodiments, each ligand is, independently selected from galactose, N-acetyl galactoseamine (GalNAc), mannose, glucose, glucoseamine and fucose. In certain embodiments, each ligand is N-acetyl galactoseamine (GalNAc). In certain embodiments, the cell-targeting moiety comprises 3 GalNAc ligands. In certain embodiments, the cell-targeting moiety comprises 2 GalNAc ligands. In certain embodiments, the cell-targeting moiety comprises 1 GalNAc ligand.

[0308] In certain embodiments, each ligand of a cell-targeting moiety is a carbohydrate, carbohydrate derivative, modified carbohydrate, polysaccharide, modified polysaccharide, or polysaccharide derivative. In certain such embodiments, the conjugate group comprises a carbohydrate cluster (see, e.g., Maier et al., “Synthesis of Antisense Oligonucleotides Conjugated to a Multivalent Carbohydrate Cluster for Cellular Targeting,” Bioconjugate Chemistry, 2003, 14, 18-29, or Rensen et al., “Design and Synthesis of Novel N-Acetylgalactosamine-Terminated Glycolipids for Targeting of Lipoproteins to the Hepatic Asiaglycoprotein Receptor,” J Med. Chem. 2004, 47, 5798-5808, which are incorporated herein by reference in their entirety). In certain such embodiments, each ligand is an amino sugar or a thio sugar. For example, amino sugars may be selected from any number of compounds known in the art, such as sialic acid, α-D-galactosamine, β-muramic acid, 2-deoxy-2-methylamino-L-glucopyranose, 4,6-dideoxy-4-formamido-2,3-di-O-methyl-D-mannopyranose, 2-deoxy-2-sulfoamino-D-glucopyranose and N-sulfo-D-glucosamine, and N-glycoloyl-α-neuraminic acid. For example, thio sugars may be selected from 5-Thio-β-D-glucopyranose, methyl 2,3,4-tri-O-acetyl-1-thio-6-O-trityl-α-D-glucopyranoside, 4-thio-β-D-galactopyranose, and ethyl 3,4,6,7-tetra-O-acetyl-2-deoxy-1,5-dithio-α-D-gluco-heptopyranoside.

[0309] In certain embodiments, conjugate groups comprise a cell-targeting moiety having the formula:

[chemical structure]

[0310] In certain embodiments, conjugate groups comprise a cell-targeting moiety having the formula:

[chemical structure]

[0311] In certain embodiments, conjugate groups comprise a cell-targeting moiety having the formula:

[chemical structure]

[0312] In certain embodiments, compounds described herein comprise a conjugate group described herein as “LICA-1”. LICA-1 is shown below without the optional cleavable moiety at the end of the conjugate linker:

[chemical structure]

[0313] In certain embodiments, compounds described herein comprise LICA-1 and a cleavable moiety within the conjugate linker have the formula:

[chemical structure]

[0314] wherein oligo is an oligonucleotide.

[0315] Representative publications that teach the preparation of certain of the above noted conjugate groups and compounds comprising conjugate groups, tethers, conjugate linkers, branching groups, ligands, cleavable moieties as well as other modifications include without limitation, U.S. Pat. Nos. 5,994,517, 6,300,319, 6,660,720, 6,906,182, 7,262,177, 7,491,805, 8,106,022, 7,723,509, 9,127,276, US 2006/0148740, US 2011/0123520, WO 2013/033230 and WO 2012/037254, Biessen et al., J. Med. Chem. 1995, 38, 1846-1852, Lee et al., Bioorganic & Medicinal Chemistry 2011, 19, 2494-2500, Rensen et al., J. Biol. Chem. 2001, 276, 37577-37584, Rensen et al., J. Med. Chem. 2004, 47, 5798-5808, Sliedregt et al., J. Med. Chem. 1999, 42, 609-618, and Valentijn et al., Tetrahedron, 1997, 53, 759-770, each of which is incorporated by reference herein in its entirety.

[0316] In certain embodiments, compounds described herein comprise modified oligonucleotides comprising a gapmer or fully modified motif and a conjugate group comprising at least one, two, or three GalNAc ligands. In certain embodiments compounds described herein comprise a conjugate group found in any of the following references: Lee, Carbohydr Res, 1978, 67, 509-514; Connolly et al., J Biol Chem, 1982, 257, 939-945; Pavia et al., Int J Pep Protein Res, 1983, 22, 539-548; Lee et al., Biochem, 1984, 23, 4255-4261; Lee et al., Glycoconjugate J, 1987, 4, 317-328; Toyokuni et al., Tetrahedron Lett, 1990, 31, 2673-2676; Biessen et al., J Med Chem, 1995, 38, 1538-1546; Valentijn et al., Tetrahedron, 1997, 53, 759-770; Kim et al., Tetrahedron Lett, 1997, 38, 3487-3490; Lee et al., Bioconjug Chem, 1997, 8, 762-765; Kato et al., Glycobiol, 2001, 11, 821-829; Rensen et al., J Biol Chem, 2001, 276, 37577-37584; Lee et al., Methods Enzymol, 2003, 362, 38-43; Westerlind et al., Glycoconj J, 2004, 21, 227-241; Lee et al., Bioorg Med Chem Lett, 2006, 16(19), 5132-5135; Maierhofer et al., Bioorg Med Chem, 2007, 15, 7661-7676; Khorev et al., Bioorg Med Chem, 2008, 16, 5216-5231; Lee et al., Bioorg Med Chem, 2011, 19, 2494-2500; Kornilova et al., Analyt Biochem, 2012, 425, 43-46; Pujol et al., Angew Chemie Int Ed Engl, 2012, 51, 7445-7448; Biessen et al., J Med Chem, 1995, 38, 1846-1852; Sliedregt et al., J Med Chem, 1999, 42, 609-618; Rensen et al., J Med Chem, 2004, 47, 5798-5808; Rensen et al., Arterioscler Thromb Vasc Biol, 2006, 26, 169-175; van Rossenberg et al., Gene Ther, 2004, 11, 457-464; Sato et al., J Am Chem Soc, 2004, 126, 14013-14022; Lee et al., J Org Chem, 2012, 77, 7564-7571; Biessen et al., FASEB J, 2000, 14, 1784-1792; Rajur et al., Bioconjug Chem, 1997, 8, 935-940; Duff et al., Methods Enzymol, 2000, 313, 297-321; Maier et al., Bioconjug Chem, 2003, 14, 18-29; Jayaprakash et al., Org Lett, 2010, 12, 5410-5413; Manoharan, Antisense Nucleic Acid Drug Dev, 2002, 12, 103-128; Merwin et al., Bioconjug Chem, 1994, 5, 612-620; Tomiya et al., Bioorg Med Chem, 2013, 21, 5275-5281; International applications WO1998/013381; WO2011/038356; WO1997/046098; WO2008/098788; WO2004/101619; WO2012/037254; WO2011/120053; WO2011/100131; WO2011/163121; WO2012/177947; WO2013/033230; WO2013/075035; WO2012/083185; WO2012/083046; WO2009/082607; WO2009/134487; WO2010/144740; WO2010/148013; WO1997/020563; WO2010/088537; WO2002/043771; WO2010/129709; WO2012/068187; WO2009/126933; WO2004/024757; WO2010/054406; WO2012/089352; WO2012/089602; WO2013/166121; WO2013/165816; U.S. Pat. Nos. 4,751,219; 8,552,163; 6,908,903; 7,262,177; 5,994,517; 6,300,319; 8,106,022; 7,491,805; 7,491,805; 7,582,744; 8,137,695; 6,383,812; 6,525,031; 6,660,720; 7,723,509; 8,541,548; 8,344,125; 8,313,772; 8,349,308; 8,450,467; 8,501,930; 8,158,601; 7,262,177; 6,906,182; 6,620,916; 8,435,491; 8,404,862; 7,851,615; Published U.S. Patent Application Publications US2011/0097264; US2011/0097265; US2013/0004427; US2005/0164235; US2006/0148740; US2008/0281044; US2010/0240730; US2003/0119724; US2006/0183886; US2008/0206869; US2011/0269814; US2009/0286973; US2011/0207799; US2012/0136042; US2012/0165393; US2008/0281041; US2009/0203135; US2012/0035115; US2012/0095075; US2012/0101148; US2012/0128760; US2012/0157509; US2012/0230938; US2013/0109817; US2013/0121954; US2013/0178512; US2013/0236968; US2011/0123520; US2003/0077829; US2008/0108801; and US2009/0203132; each of which is incorporated by reference in its entirety.

### Compositions and Methods for Formulating Pharmaceutical Compositions

[0317] Compounds described herein may be admixed with pharmaceutically acceptable active or inert substances for the preparation of pharmaceutical compositions or formulations. Compositions and methods for the formulation of pharmaceutical compositions are dependent upon a number of criteria, including, but not limited to, route of administration, or extent of disease.

[0318] Certain embodiments provide pharmaceutical compositions comprising one or more compounds or a salt thereof. In certain embodiments, the compounds are antisense compounds or oligomeric compounds. In certain embodiments, the compounds comprise or consist of a modified oligonucleotide. In certain such embodiments, the pharmaceutical composition comprises a suitable pharmaceutically acceptable diluent or carrier. In certain embodiments, a pharmaceutical composition comprises a sterile saline solution and one or more compound. In certain embodiments, such pharmaceutical composition consists of a sterile saline solution and one or more compound. In certain embodiments, the sterile saline is pharmaceutical grade saline. In certain embodiments, a pharmaceutical composition comprises one or more compound and sterile water. In certain embodiments, a pharmaceutical composition consists of one compound and sterile water. In certain embodiments, the sterile water is pharmaceutical grade water. In certain embodiments, a pharmaceutical composition comprises one or more compound and phosphate-buffered saline (PBS). In certain embodiments, a pharmaceutical composition consists of one or more compound and sterile PBS. In certain embodiments, the sterile PBS is pharmaceutical grade PBS. Compositions and methods for the formulation of pharmaceutical compositions are dependent upon a number of criteria, including, but not limited to, route of administration, or extent of disease.

[0319] A compound described herein targeted to PCSK9 nucleic acid can be utilized in pharmaceutical compositions by combining the compound with a suitable pharmaceutically acceptable diluent or carrier. In certain embodiments, a pharmaceutically acceptable diluent is water, such as sterile water suitable for injection. Accordingly, in one embodiment, employed in the methods described herein is a pharmaceutical composition comprising a compound targeted to PCSK9 nucleic acid and a pharmaceutically acceptable diluent. In certain embodiments, the pharmaceutically acceptable diluent is water. In certain embodiments, the compound comprises or consists of a modified oligonucleotide provided herein.

[0320] Pharmaceutical compositions comprising compounds provided herein encompass any pharmaceutically acceptable salts, esters, or salts of such esters, or any other oligonucleotide which, upon administration to an animal, including a human, is capable of providing (directly or indirectly) the biologically active metabolite or residue thereof. In certain embodiments, the compounds are antisense compounds or oligomeric compounds. In certain embodiments, the compound comprises or consists of a modified oligonucleotide. Accordingly, for example, the disclosure is also drawn to pharmaceutically acceptable salts of compounds, prodrugs, pharmaceutically acceptable salts of such prodrugs, and other bioequivalents. Suitable pharmaceutically acceptable salts include, but are not limited to, sodium and potassium salts.

[0321] A prodrug can include the incorporation of additional nucleosides at one or both ends of a compound which are cleaved by endogenous nucleases within the body, to form the active compound.

In certain embodiments, the compounds or compositions further comprise a pharmaceutically acceptable carrier or diluent.

### Certain Selected Compounds

[0322] Approximately 1540 newly designed compounds and a few previously disclosed compounds of various lengths, chemistries, and motifs were tested for their effect on human PCSK9 mRNA in vitro in several cell types (Example 1-2). Of 1540 compounds tested for potency at a single dose in vitro, 183 selected compounds were tested for dose dependent inhibition in HepG2 cells (Example 2). Of the 183 compounds tested by dose response assays, 134 oligonucleotides were selected for single dose in vivo tolerability in rodents. These 134 oligonucleotides were conjugated at the 3′-end with THA-C6-GalNAc3-(3R,5S)-5-(hydroxymethyl) pyrrolidin-3-ol phosphate endcap (henceforth referred to as 3′-THA).

[0323] In the single dose rodent tolerability model, BALB/c mice are dosed with a high concentration of 3′-THA oligonucleotide and liver function markers, such as alanine transaminase and aspartate transaminase, are measured (Example 3). ISIS 863413 (SEQ ID NO: 1096), ISIS 863419 (SEQ ID NO: 1419), ISIS 863424 (SEQ ID NO: 1297), ISIS 863425 (SEQ ID NO: 1528), ISIS 863427 (SEQ ID NO: 1145), ISIS 863433 (SEQ ID NO: 1223), ISIS 863434 (SEQ ID NO: 377), ISIS 863436 (SEQ ID NO: 763), ISIS 863437 (SEQ ID NO: 994), ISIS 863438 (SEQ ID NO: 1071), ISIS 863439 (SEQ ID NO: 1147), ISIS 863441 (SEQ ID NO: 1302), ISIS 863444 (SEQ ID NO: 1149), ISIS 863445 (SEQ ID NO: 455), ISIS 863448 (SEQ ID NO: 1380), ISIS 863452 (SEQ ID NO: 691), ISIS 863472 (SEQ ID NO: 926), ISIS 863473 (SEQ ID NO: 1233), ISIS 863474 (SEQ ID NO: 619), ISIS 863475 (SEQ ID NO: 388), ISIS 863477 (SEQ ID NO: 1542), ISIS 863479 (SEQ ID NO: 1158), ISIS 863480 (SEQ ID NO: 1235), ISIS 863481 (SEQ ID NO: 389), ISIS 863482 (SEQ ID NO: 1312), ISIS 863483 (SEQ ID NO: 1240), ISIS 863484 (SEQ ID NO: 549), ISIS 863485 (SEQ ID NO: 550), ISIS 863486 (SEQ ID NO: 781), ISIS 863489 (SEQ ID NO: 939), ISIS 863490 (SEQ ID NO: 1016), ISIS 863491 (SEQ ID NO: 1243), ISIS 863493 (SEQ ID NO: 629), ISIS 863494 (SEQ ID NO: 1017), ISIS 863495 (SEQ ID NO: 1092), ISIS 863496 (SEQ ID NO: 1244), ISIS 863497 (SEQ ID NO: 554), ISIS 863498 (SEQ ID NO: 478), ISIS 863499 (SEQ ID NO: 1094), ISIS 863502 (SEQ ID NO: 563), ISIS 863506 (SEQ ID NO: 410), ISIS 863507 (SEQ ID NO: 1411), ISIS 863509 (SEQ ID NO: 721), ISIS 863510 (SEQ ID NO: 1258), ISIS 863511 (SEQ ID NO: 645), ISIS 863512 (SEQ ID NO: 955), ISIS 863514 (SEQ ID NO: 1413), ISIS 863516 (SEQ ID NO: 881), ISIS 863517 (SEQ ID NO: 648), ISIS 863518 (SEQ ID NO: 725), ISIS 863520 (SEQ ID NO: 1111), ISIS 863522 (SEQ ID NO: 1188), ISIS 863524 (SEQ ID NO: 885), ISIS 863525 (SEQ ID NO: 504), ISIS 863526 (SEQ ID NO: 1043), ISIS 863527 (SEQ ID NO: 1195), ISIS 863531 (SEQ ID NO: 426), ISIS 863533 (SEQ ID NO: 427), ISIS 863536 (SEQ ID NO: 585), ISIS 863537 (SEQ ID NO: 1047), ISIS 863538 (SEQ ID NO: 353), ISIS 863539 (SEQ ID NO: 1352), ISIS 863541 (SEQ ID NO: 1203), ISIS 863545 (SEQ ID NO: 1516), ISIS 863547 (SEQ ID NO: 1213), ISIS 863548 (SEQ ID NO: 367), ISIS 863549 (SEQ ID NO: 1061), ISIS 863550 (SEQ ID NO: 523), ISIS 863552 (SEQ ID NO: 831), and ISIS 863553 (SEQ ID NO: 908) were considered tolerable in this study and were selected for further evaluation in a transgenic mouse model.

[0324] In the PCSK9 transgenic mice tolerability model, mice were dosed with 3′-THA conjugated oligonucleotides and plasma levels of alanine transaminase, aspartate transaminase, cholesterol, HDL-cholesterol, LDL-cholesterol and triglycerides were measured (Example 4). ISIS 863433, ISIS 863490, ISIS 863512, ISIS 863527, ISIS 863538, ISIS 863425, ISIS 863438, ISIS 863439, ISIS 863444, ISIS 863413, ISIS 863434, ISIS 863436, ISIS 863494, and ISIS 863539 were found tolerable. The selected oligonucleotide sequences were conjugated at the 5′-end with Trishexylamino-(THA)-C6GalNAC3 endcap (henceforth referred to as 5′-THA) and tested in the CD-1 mouse model. The 5′THA conjugated oligonucleotides are ISIS 845219, ISIS 863568, ISIS 863576, ISIS 863577, ISIS 863579, ISIS 863581, ISIS 863582, ISIS 863587, ISIS 863633, ISIS 863637, ISIS 863655, ISIS 863670, ISIS 863681, and ISIS 863682.

[0325] In the CD-1 mice tolerability model, mice were dosed for six weeks with varying doses of antisense oligonucleotide and tolerability markers, such as liver and kidney function markers (plasma levels of ALT, AST, albumin, BUN, creatinine, and bilirubin), hematology markers (blood cell counts for RBC, WBC, platelets, neutrophils, lymphocytes, and monocytes, as well as hemoglobin, hematocrit, and MCV content), and body and organ weights were measured (Example 5). Only those oligonucleotides were selected for further evaluation in the rat model, where treatment yielded plasma levels of such markers which were within the expected range after treatment with antisense oligonucleotides. ISIS 863568, ISIS 863576, ISIS 863579, ISIS 863581, ISIS 863582, ISIS 863587, ISIS 863633, ISIS 863655, ISIS 863670, and ISIS 863681 were selected for further study in the rat model.

[0326] In the Sprague-Dawley rat model, similarly, the rats were dosed for 6 weeks with antisense oligonucleotides and tolerability markers, such as liver function markers (plasma levels of ALT, AST, albumin, BUN, creatinine, and bilirubin), kidney function markers (urine levels of creatinine and total protein), and weekly body weights, and final organ weights were measured (Example 6).

[0327] These oligonucleotides were also tested for their viscosity (Example 8) and all found to be optimal in their viscosity under the criteria tested. ISIS 863568, ISIS 863579, ISIS 863581, ISIS 863582, ISIS 863587, ISIS 863633, ISIS 863655, ISIS 863670, and ISIS 863681 were tested in a dose-dependent four-week study in the PCSK9 transgenic mice model for efficacy (Example 7). At the end of 4 weeks, mice liver was analyzed for PCSK9 mRNA expression levels and the ED₅₀ was calculated. In addition, PCSK9 plasma protein levels, LDL-cholesterol plasma levels, and LDL-receptor levels in the liver were measured. It was observed that treatment with the antisense oligonucleotides resulted in inhibition of PCSK9 liver mRNA expression levels, reduction in LDL-cholesterol levels in the plasma, and corresponding increase in LDL receptor levels in the liver. Specifically, ISIS 863633 treatment was found to be efficacious.

[0328] ISIS 863568, ISIS 863579, ISIS 863581, ISIS 863582, ISIS 863587, ISIS 863633, ISIS 863655, ISIS 863670, and ISIS 863681 were tested for activity, pharmacokinetic profile and tolerability in a 12-week study in cynomolgus monkeys (Example 9). Treatment with the compounds that were fully cross-reactive with the rhesus monkey gene sequence caused reduction of PCSK9 mRNA expression in liver tissue. Specifically, treatment with ISIS 863633, ISIS 863670, and ISIS 863681 caused a reduction of PCSK9 mRNA expression in liver tissue, compared to the PBS control. It was noted that ISIS 863633 caused the highest reduction of PCSK9 mRNA expression compared to the PBS control. Changes in PCSK9 protein levels, LDL-cholesterol levels, total cholesterol levels, and hepatic LDL-receptor levels are a consequence of inhibition of PCSK9 mRNA levels. Treatment with ISIS 863633, ISIS 863670, and ISIS 863681 caused decreases in PCSK9 protein levels, LDL-cholesterol levels, total cholesterol levels, and induction of hepatic LDL-receptor levels, with ISIS 863633 causing the highest change. Treatment with the antisense oligonucleotides did not cause any changes in HDL-cholesterol or triglyceride levels. Hence, in terms of activity, ISIS 863633 was the most effective in the monkey study. Treatment with the compounds was well tolerated in the monkeys, in particular, treatment with ISIS 863633.

[0329] The new compounds were compared with previously designed compounds, including ISIS 405879 and ISIS 405995, which have previously been determined to be some of the most potent antisense compounds in vitro (see e.g., U.S. Pat. No. 8,084,437), as well as ISIS 431131 and ISIS 480604, which have been previously described in U.S. Pat. No. 9,127,276 (Example 10). The head-to-head comparison demonstrated that ISIS 863568, ISIS 863579, ISIS 863581, ISIS 863582, ISIS 863587, ISIS 863633, ISIS 863655, ISIS 863670, and ISIS 863681 were more efficacious than any of the previously publicly disclosed oligonucleotides.

[0330] Accordingly, provided herein are compounds with any one or more of the improved properties. In certain embodiments, the compounds as described herein are potent and tolerable.

### EXAMPLES

[0331] The Examples below describe the screening process to identify lead compounds targeted to PCSK9. Out of over 1540 oligonucleotides that were screened, ISIS 863568, ISIS 863579, ISIS 863581, ISIS 863582, ISIS 863587, ISIS 863633, ISIS 863655, ISIS 863670, and ISIS 863681 emerged as the top lead compounds. In particular, ISIS 863633 exhibited the best combination of properties in terms of potency and tolerability out of over 1540 oligonucleotides.

### Non-Limiting Disclosure and Incorporation by Reference

[0332] Although the sequence listing accompanying this filing identifies each sequence as either “RNA” or “DNA” as required, in reality, those sequences may be modified with any combination of chemical modifications. One of skill in the art will readily appreciate that such designation as “RNA” or “DNA” to describe modified oligonucleotides is, in certain instances, arbitrary. For example, an oligonucleotide comprising a nucleoside comprising a 2′-OH sugar moiety and a thymine base could be described as a DNA having a modified sugar (2′-OH for the natural 2′-H of DNA) or as an RNA having a modified base (thymine (methylated uracil) for natural uracil of RNA). As provided herein, a designation of ‘0’ for mRNA inhibition assays merely indicates that the antisense oligonucleotide did not inhibit mRNA expression levels.

[0333] Accordingly, nucleic acid sequences provided herein, including, but not limited to those in the sequence listing, are intended to encompass nucleic acids containing any combination of natural or modified RNA and/or DNA, including, but not limited to such nucleic acids having modified nucleobases. By way of further example and without limitation, an oligonucleotide having the nucleobase sequence “ATCGATCG” encompasses any oligonucleotides having such nucleobase sequence, whether modified or unmodified, including, but not limited to, such compounds comprising RNA bases, such as those having sequence “AUCGAUCG” and those having some DNA bases and some RNA bases such as “AUCGATCG” and compounds having other modified nucleobases, such as “AT^{m}CGAUCG,” wherein ^{m}C indicates a cytosine base comprising a methyl group at the 5-position.

[0334] While certain compounds, compositions and methods described herein have been described with specificity in accordance with certain embodiments, the following examples serve only to illustrate the compounds described herein and are not intended to limit the same. Each of the references recited in the present application is incorporated herein by reference in its entirety.

### Example 1: Antisense Inhibition of Human PCSK9 in HepG2 Cells by 3-10-3 cEt Gapmers

[0335] Antisense oligonucleotides were designed targeting a PCSK9 nucleic acid and were tested for their effects on PCSK9 mRNA in vitro. The chimeric antisense oligonucleotides in the Tables below were designed as 3-10-3 cEt gapmers. The gapmers are 16 nucleosides in length, wherein the central gap segment is comprised of ten 2′-deoxynucleosides and is flanked by wing segments on the 5′ end and the 3′ end of three nucleosides each. Each nucleoside in the 5′ wing segment and each nucleoside in the 3′ wing segment has a cEt sugar modification. The internucleoside linkages throughout each gapmer are phosphorothioate (P═S) linkages. All cytosine residues throughout each gapmer are 5-methylcytosines.

[0336] “Start site” indicates the 5′-most nucleoside to which the gapmer is targeted in the human gene sequence. “Stop site” indicates the 3′-most nucleoside to which the gapmer is targeted human gene sequence. Each gapmer listed in the Tables below is targeted to either the human PCSK9 mRNA, designated herein as SEQ ID NO: 1 (GENBANK Accession No. NM_174936.3) or the human PCSK9 genomic sequence, designated herein as SEQ ID NO: 2 (GENBANK Accession No. NC_000001.11 truncated from nucleotides 55036001 to 55068000). ‘n/a’ indicates that the antisense oligonucleotide does not target that particular gene sequence with 10000 complementarity.

[0337] The antisense oligonucleotides were tested in a series of experiments that had similar culture conditions. The results for each experiment are presented in separate tables shown below.

### Study 1

[0338] Cultured HepG2 cells at a density of 20,000 cells per well were transfected using electroporation with 1,000 nM antisense oligonucleotide. ISIS 431131, previously disclosed in W 2014179620, was also included in the study as a benchmark oligonucleotide. After a treatment period of approximately 24 hours, RNA was isolated from the cells and PCSK9 mRNA levels were measured by quantitative real-time PCR. Human PCSK9 primer probe set from ABI (ID4 Hs03037355_m1) was used to measure mRNA levels. PCSK9 mRNA levels were adjusted according to total RNA content, as measured by RIBOGREEN®. Results are presented as percent inhibition of PCSK9, relative to untreated control cells. Several of the newly designed oligonucleotides were more potent than the previously disclosed oligonucleotide, ISIS 431131.

TABLE 1
Inhibition of PCSK9 mRNA by 3-10-3 cEt gapmers
targeting SEQ ID NO: 1 and 2

| | SEQ | SEQ | | | SEQ | SEQ | |
|---|---|---|---|---|---|---|---|
| | ID: 1 | ID: 1 | | | ID: 2 | ID 2: | SEQ |
| ISIS | Start | Stop | | % | Start | Stop | ID |
| No | Site | Site | Sequence | inhibition | Site | Site | NO |
| 431131 | 1015 | 1034 | GTCACACTTGCTGGCCTGTC | 3 | N/A | N/A | 3 |
| 859373 | N/A | N/A | TCTGCCGTCCTTCCCA | 36 | 4562 | 4577 | 4 |
| 859377 | N/A | N/A | AGCATCTGCCGTCCTT | 62 | 4566 | 4581 | 5 |
| 859381 | N/A | N/A | TGTCAAGCACCACAGC | 31 | 5010 | 5025 | 6 |
| 859385 | N/A | N/A | TGACTTGTCAAGCACC | 61 | 5015 | 5030 | 7 |
| 859389 | N/A | N/A | ATAAGTGACTTGTCAA | 45 | 5020 | 5035 | 8 |
| 859393 | N/A | N/A | GCATTGTAAGTTCACT | 84 | 5138 | 5153 | 9 |
| 859397 | N/A | N/A | GCTTGCATTGTAAGTT | 29 | 5142 | 5157 | 10 |
| 859401 | N/A | N/A | GGTTTTCCCAGCTCTG | 85 | 5897 | 5912 | 11 |
| 859405 | N/A | N/A | CTCTGGTTTTCCCAGC | 72 | 5901 | 5916 | 12 |
| 859409 | N/A | N/A | CCACCTCTGGTTTTCC | 67 | 5905 | 5920 | 13 |
| 859413 | N/A | N/A | GTCTGCTCCAACTGCT | 43 | 6714 | 6729 | 14 |
| 859417 | N/A | N/A | CTCTTGTCTGCTCCAA | 55 | 6719 | 6734 | 15 |
| 859421 | N/A | N/A | TTTAGCTCTTGTCTGC | 45 | 6724 | 6739 | 16 |
| 859425 | N/A | N/A | GCAAGTCCCTGCTAGA | 18 | 11238 | 11253 | 17 |
| 859429 | N/A | N/A | CACCTGCAAGTCCCTG | 15 | 11243 | 11258 | 18 |
| 859433 | N/A | N/A | ATTGCCACCTGCAAGT | 4 | 11248 | 11263 | 19 |
| 859437 | N/A | N/A | TCATTCTCTCCTCAGG | 8 | 11294 | 11309 | 20 |
| 859441 | N/A | N/A | TGGACCCACCACATTG | 34 | 11383 | 11398 | 21 |
| 859445 | N/A | N/A | TGCATGGACCCACCAC | 61 | 11387 | 11402 | 22 |
| 859449 | N/A | N/A | CATGTTGCATGGACCC | 61 | 11392 | 11407 | 23 |
| 859453 | N/A | N/A | ACAGTAGCCCCCCAAC | 46 | 11608 | 11623 | 24 |
| 859457 | N/A | N/A | TCACACAGTAGCCCCC | 52 | 11612 | 11627 | 25 |
| 859461 | N/A | N/A | AAAGTCACACAGTAGC | 51 | 11616 | 11631 | 26 |
| 859465 | N/A | N/A | GGTCACACAGTTTGGG | 58 | 11639 | 11654 | 27 |
| 859469 | N/A | N/A | ACATATGCAAGGTCAC | 74 | 11649 | 11664 | 28 |
| 859473 | N/A | N/A | ACTCAGACATATGCAA | 32 | 11655 | 11670 | 29 |
| 859477 | N/A | N/A | AGTGTCCCTCTTGGTC | 59 | 11950 | 11965 | 30 |
| 859481 | N/A | N/A | TGCCAGTGTCCCTCTT | 37 | 11954 | 11969 | 31 |
| 859485 | N/A | N/A | TGATCCTCTGCCAGTG | 58 | 11962 | 11977 | 32 |
| 859489 | N/A | N/A | TCTGTGATCCTCTGCC | 50 | 11966 | 11981 | 33 |
| 859493 | N/A | N/A | GGTCTCTGTGATCCTC | 67 | 11970 | 11985 | 34 |
| 859497 | N/A | N/A | AGCTCTAGGGCCCATG | 6 | 12671 | 12686 | 35 |
| 859501 | N/A | N/A | AGCCAGCTCTAGGGCC | 0 | 12675 | 12690 | 36 |
| 859505 | N/A | N/A | GTGGGTGCTCAAAACG | 28 | 12924 | 12939 | 37 |
| 859509 | N/A | N/A | AATAATGCCCCCGTAG | 26 | 13176 | 13191 | 38 |
| 859513 | N/A | N/A | CTGGTTAATAATGCCC | 47 | 13182 | 13197 | 39 |
| 859517 | N/A | N/A | CTGGATACATTGGCAG | 25 | 14125 | 14140 | 40 |
| 859521 | N/A | N/A | CTCTGAGTGTGTTAGG | 54 | 14473 | 14488 | 41 |
| 859525 | N/A | N/A | TGCTCTCTGAGTGTGT | 26 | 14477 | 14492 | 42 |
| 859529 | N/A | N/A | GCATGCTGAGCAGGTC | 78 | 14541 | 14556 | 43 |
| 859533 | N/A | N/A | TGTAGCATGCTGAGCA | 73 | 14545 | 14560 | 44 |
| 859537 | N/A | N/A | ATTCAGTGGCTGCTCT | 0 | 14755 | 14770 | 45 |
| 859541 | N/A | N/A | GAGCAATTCAGTGGCT | 24 | 14760 | 14775 | 46 |
| 859310 | 979 | 994 | TCCTCGGGCACATTCT | 34 | 16371 | 16386 | 47 |
| 468460 | 1075 | 1090 | TTGGCCACGCCGGCAT | 8 | 16705 | 16720 | 48 |
| 859545 | N/A | N/A | ATTTAGCAGCTACGGC | 35 | 17441 | 17456 | 49 |
| 859549 | N/A | N/A | CAACTATTTAGCAGCT | 36 | 17446 | 17461 | 50 |
| 859553 | N/A | N/A | AGGTTACCGCTGTCAG | 73 | 20914 | 20929 | 51 |
| 859557 | N/A | N/A | GACCTAGGTTACCGCT | 33 | 20919 | 20934 | 52 |
| 859314 | 1498 | 1513 | CCACTCTGTGACACAA | 79 | 21470 | 21485 | 53 |
| 859318 | 1503 | 1518 | ATGTCCCACTCTGTGA | 49 | 21475 | 21490 | 54 |
| 859561 | N/A | N/A | CTCGAAGGTAAGCCGC | 66 | 21891 | 21906 | 55 |
| 859565 | N/A | N/A | CAGCACTGTCCTGCAG | 20 | 22880 | 22895 | 56 |
| 859569 | N/A | N/A | TTTTTGCTGGTTTGAG | 34 | 23030 | 23045 | 57 |
| 859573 | N/A | N/A | CACTTTTTTGCTGGTT | 58 | 23034 | 23049 | 58 |
| 859577 | N/A | N/A | AATTCCACTTTTTTGC | 15 | 23039 | 23054 | 59 |
| 859581 | N/A | N/A | ATCTGTGCACTATCCT | 28 | 23069 | 23084 | 60 |
| 859585 | N/A | N/A | TGGCATCTGTGCACTA | 55 | 23073 | 23088 | 61 |
| 859589 | N/A | N/A | TCTCACACGAGCATTA | 16 | 23176 | 23191 | 62 |
| 859593 | N/A | N/A | CTGCCTCTCACACGAG | 46 | 23181 | 23196 | 63 |
| 859597 | N/A | N/A | TCTTATGGAGGAGGAA | 23 | 23853 | 23868 | 64 |
| 859601 | N/A | N/A | TGTTTTCGACACAGGG | 68 | 24225 | 24240 | 65 |
| 859605 | N/A | N/A | GGCATGTTTTCGACAC | 68 | 24229 | 24244 | 66 |
| 859609 | N/A | N/A | CATCTTTTCAGTACTC | 43 | 26516 | 26531 | 67 |
| 859613 | N/A | N/A | ATCGCATCTTTTCAGT | 31 | 26520 | 26535 | 68 |
| 859322 | 2429 | 2444 | CTGTCACTGGAGCTCC | 26 | 27572 | 27587 | 69 |
| 859325 | 2495 | 2510 | GTCGGAACCATTTTAA | 34 | 27638 | 27653 | 70 |
| 859329 | 2501 | 2516 | GGACAAGTCGGAACCA | 29 | 27644 | 27659 | 71 |
| 859333 | 2505 | 2520 | AGAGGGACAAGTCGGA | 61 | 27648 | 27663 | 72 |
| 859337 | 3461 | 3476 | ATCTCCGCCAGGCCAG | 24 | 28604 | 28619 | 73 |
| 859341 | 3465 | 3480 | AAGCATCTCCGCCAGG | 68 | 28608 | 28623 | 74 |
| 859345 | 3470 | 3485 | CTTAGAAGCATCTCCG | 61 | 28613 | 28628 | 75 |
| 859349 | 3476 | 3491 | CCATGCCTTAGAAGCA | 58 | 28619 | 28634 | 76 |
| 859353 | 3538 | 3553 | TGTCTGCTTGCTTGGG | 62 | 28681 | 28696 | 77 |
| 859357 | 3544 | 3559 | GATAAATGTCTGCTTG | 37 | 28687 | 28702 | 78 |
| 859361 | 3593 | 3608 | GTCTAGAAAAGTTGGC | 63 | 28736 | 28751 | 79 |
| 859365 | 3597 | 3612 | ACAGGTCTAGAAAAGT | 64 | 28740 | 28755 | 80 |
| 859369 | 3606 | 3621 | AAAAGCAAAACAGGTC | 33 | 28749 | 28764 | 81 |

TABLE 2

| | SEQ | SEQ | | | SEQ | SEQ | |
|---|---|---|---|---|---|---|---|
| | ID: 1 | ID: 1 | | | ID: 2 | ID 2: | |
| | Start | Stop | | % | Start | Stop | SEQ |
| ISIS No | Site | Site | Sequence | inhibition | Site | Site | ID NO |
| 431131 | 1015 | 1034 | GTCACACTTGCTGGCCTGTC | 0 | N/A | N/A | 3 |
| 859374 | N/A | N/A | ATCTGCCGTCCTTCCC | 42 | 4563 | 4578 | 82 |
| 859378 | N/A | N/A | CAGCATCTGCCGTCCT | 62 | 4567 | 4582 | 83 |
| 859382 | N/A | N/A | CTTGTCAAGCACCACA | 61 | 5012 | 5027 | 84 |
| 859386 | N/A | N/A | GTGACTTGTCAAGCAC | 10 | 5016 | 5031 | 85 |
| 859390 | N/A | N/A | TGTAAGTTCACTCATG | 56 | 5134 | 5149 | 86 |
| 859394 | N/A | N/A | TGCATTGTAAGTTCAC | 71 | 5139 | 5154 | 87 |
| 859398 | N/A | N/A | GGGCTTGCATTGTAAG | 13 | 5144 | 5159 | 88 |
| 859402 | N/A | N/A | TGGTTTTCCCAGCTCT | 78 | 5898 | 5913 | 89 |
| 859406 | N/A | N/A | CCTCTGGTTTTCCCAG | 61 | 5902 | 5917 | 90 |
| 859410 | N/A | N/A | TCCACCTCTGGTTTTC | 41 | 5906 | 5921 | 91 |
| 859414 | N/A | N/A | TTGTCTGCTCCAACTG | 39 | 6716 | 6731 | 92 |
| 859418 | N/A | N/A | GCTCTTGTCTGCTCCA | 71 | 6720 | 6735 | 93 |
| 859422 | N/A | N/A | TATAAATCTCCCATCC | 0 | 7280 | 7295 | 94 |
| 859426 | N/A | N/A | CTGCAAGTCCCTGCTA | 12 | 11240 | 11255 | 95 |
| 859430 | N/A | N/A | CCACCTGCAAGTCCCT | 26 | 11244 | 11259 | 96 |
| 859434 | N/A | N/A | CTCTCCTCAGGCCAGG | 64 | 11289 | 11304 | 97 |
| 859438 | N/A | N/A | CCCACCACATTGCATC | 37 | 11379 | 11394 | 98 |
| 859442 | N/A | N/A | ATGGACCCACCACATT | 10 | 11384 | 11399 | 99 |
| 859446 | N/A | N/A | TTGCATGGACCCACCA | 40 | 11388 | 11403 | 100 |
| 859450 | N/A | N/A | CGAGAACCGGTAAGGG | 34 | 11447 | 11462 | 101 |
| 859454 | N/A | N/A | CACAGTAGCCCCCCAA | 32 | 11609 | 11624 | 102 |
| 859458 | N/A | N/A | GTCACACAGTAGCCCC | 69 | 11613 | 11628 | 103 |
| 859462 | N/A | N/A | GCAAAGTCACACAGTA | 64 | 11618 | 11633 | 104 |
| 859466 | N/A | N/A | AGGTCACACAGTTTGG | 83 | 11640 | 11655 | 105 |
| 859470 | N/A | N/A | GACATATGCAAGGTCA | 40 | 11650 | 11665 | 106 |
| 859474 | N/A | N/A | TCCCTCTTGGTCTCTG | 55 | 11946 | 11961 | 107 |
| 859478 | N/A | N/A | CAGTGTCCCTCTTGGT | 67 | 11951 | 11966 | 108 |
| 859482 | N/A | N/A | CTGCCAGTGTCCCTCT | 1 | 11955 | 11970 | 109 |
| 859486 | N/A | N/A | GTGATCCTCTGCCAGT | 35 | 11963 | 11978 | 110 |
| 859490 | N/A | N/A | CTCTGTGATCCTCTGC | 68 | 11967 | 11982 | 111 |
| 859494 | N/A | N/A | GGGTCTCTGTGATCCT | 33 | 11971 | 11986 | 112 |
| 859498 | N/A | N/A | CAGCTCTAGGGCCCAT | 56 | 12672 | 12687 | 113 |
| 859502 | N/A | N/A | CAGCCAGCTCTAGGGC | 31 | 12676 | 12691 | 114 |
| 859506 | N/A | N/A | AGTGGGTGCTCAAAAC | 23 | 12925 | 12940 | 115 |
| 859510 | N/A | N/A | TTAATAATGCCCCCGT | 32 | 13178 | 13193 | 116 |
| 859514 | N/A | N/A | CCTGGTTAATAATGCC | 36 | 13183 | 13198 | 117 |
| 859518 | N/A | N/A | GAGTGTGTTAGGAGCT | 83 | 14469 | 14484 | 118 |
| 859522 | N/A | N/A | TCTCTGAGTGTGTTAG | 21 | 14474 | 14489 | 119 |
| 859526 | N/A | N/A | CTTGCTCTCTGAGTGT | 42 | 14479 | 14494 | 120 |
| 859530 | N/A | N/A | AGCATGCTGAGCAGGT | 54 | 14542 | 14557 | 121 |
| 859534 | N/A | N/A | CTGTAGCATGCTGAGC | 71 | 14546 | 14561 | 122 |
| 859538 | N/A | N/A | AATTCAGTGGCTGCTC | 27 | 14756 | 14771 | 123 |
| 859542 | N/A | N/A | AGAGCAATTCAGTGGC | 42 | 14761 | 14776 | 124 |
| 859311 | 981 | 996 | CCTCCTCGGGCACATT | 14 | 16373 | 16388 | 125 |
| 468460 | 1075 | 1090 | TTGGCCACGCCGGCAT | 0 | 16705 | 16720 | 48 |
| 859546 | N/A | N/A | CTATTTAGCAGCTACG | 57 | 17443 | 17458 | 126 |
| 859550 | N/A | N/A | TCAACTATTTAGCAGC | 56 | 17447 | 17462 | 127 |
| 859554 | N/A | N/A | TAGGTTACCGCTGTCA | 47 | 20915 | 20930 | 128 |
| 859558 | N/A | N/A | GGACCTAGGTTACCGC | 49 | 20920 | 20935 | 129 |
| 859315 | 1499 | 1514 | CCCACTCTGTGACACA | 94 | 21471 | 21486 | 130 |
| 859319 | 1505 | 1520 | TGATGTCCCACTCTGT | 31 | 21477 | 21492 | 131 |
| 859562 | N/A | N/A | GTCCTGCAGCCTCTAG | 30 | 22873 | 22888 | 132 |
| 859566 | N/A | N/A | CCAGCACTGTCCTGCA | 54 | 22881 | 22896 | 133 |
| 859570 | N/A | N/A | TTTTTTGCTGGTTTGA | 33 | 23031 | 23046 | 134 |
| 859574 | N/A | N/A | CCACTTTTTTGCTGGT | 21 | 23035 | 23050 | 135 |
| 859578 | N/A | N/A | CAATTCCACTTTTTTG | 41 | 23040 | 23055 | 136 |
| 859582 | N/A | N/A | CATCTGTGCACTATCC | 48 | 23070 | 23085 | 137 |
| 859586 | N/A | N/A | ATGGCATCTGTGCACT | 30 | 23074 | 23089 | 138 |
| 859590 | N/A | N/A | CCTCTCACACGAGCAT | 48 | 23178 | 23193 | 139 |
| 859594 | N/A | N/A | TCTGCCTCTCACACGA | 29 | 23182 | 23197 | 140 |
| 859598 | N/A | N/A | TTCGACACAGGGTAGC | 67 | 24221 | 24236 | 141 |
| 859602 | N/A | N/A | ATGTTTTCGACACAGG | 66 | 24226 | 24241 | 142 |
| 859606 | N/A | N/A | TGGGCATGTTTTCGAC | 0 | 24231 | 24246 | 143 |
| 859610 | N/A | N/A | GCATCTTTTCAGTACT | 55 | 26517 | 26532 | 144 |
| 859614 | N/A | N/A | CATCGCATCTTTTCAG | 40 | 26521 | 26536 | 145 |
| 468484 | 2430 | 2445 | GCTGTCACTGGAGCTC | 46 | 27573 | 27588 | 146 |
| 859326 | 2497 | 2512 | AAGTCGGAACCATTTT | 56 | 27640 | 27655 | 147 |
| 859330 | 2502 | 2517 | GGGACAAGTCGGAACC | 57 | 27645 | 27660 | 148 |
| 859334 | 3458 | 3473 | TCCGCCAGGCCAGTGA | 33 | 28601 | 28616 | 149 |
| 859338 | 3462 | 3477 | CATCTCCGCCAGGCCA | 57 | 28605 | 28620 | 150 |
| 859342 | 3466 | 3481 | GAAGCATCTCCGCCAG | 56 | 28609 | 28624 | 151 |
| 859346 | 3472 | 3487 | GCCTTAGAAGCATCTC | 67 | 28615 | 28630 | 152 |
| 859350 | 3477 | 3492 | ACCATGCCTTAGAAGC | 41 | 28620 | 28635 | 153 |
| 859354 | 3540 | 3555 | AATGTCTGCTTGCTTG | 69 | 28683 | 28698 | 154 |
| 859358 | 3546 | 3561 | AAGATAAATGTCTGCT | 69 | 28689 | 28704 | 155 |
| 859362 | 3594 | 3609 | GGTCTAGAAAAGTTGG | 51 | 28737 | 28752 | 156 |
| 859366 | 3602 | 3617 | GCAAAACAGGTCTAGA | 52 | 28745 | 28760 | 157 |
| 859370 | 3632 | 3647 | ACCCAGAATAAATATC | 28 | 28775 | 28790 | 158 |

TABLE 3
Inhibition of PCSK9 mRNA by 3-10-3 cEt gapmers
targeting SEQ ID NO: 1 and 2

| | SEQ | SEQ | | | SEQ | SEQ | |
|---|---|---|---|---|---|---|---|
| | ID: 1 | ID: 1 | | | ID: 2 | ID 2: | |
| | Start | Stop | | % | Start | Stop | SEQ |
| ISIS No | Site | Site | Sequence | inhibition | Site | Site | ID NO |
| 431131 | 1015 | 1034 | GTCACACTTGCTGGCCTGTC | 10 | N/A | N/A | 3 |
| 859375 | N/A | N/A | CATCTGCCGTCCTTCC | 28 | 4564 | 4579 | 159 |
| 859379 | N/A | N/A | CCAGCATCTGCCGTCC | 55 | 4568 | 4583 | 160 |
| 859383 | N/A | N/A | ACTTGTCAAGCACCAC | 66 | 5013 | 5028 | 161 |
| 859387 | N/A | N/A | AGTGACTTGTCAAGCA | 84 | 5017 | 5032 | 162 |
| 859391 | N/A | N/A | ATTGTAAGTTCACTCA | 70 | 5136 | 5151 | 163 |
| 859395 | N/A | N/A | TTGCATTGTAAGTTCA | 82 | 5140 | 5155 | 164 |
| 859399 | N/A | N/A | AAATTGAATGAATTGG | 26 | 5768 | 5783 | 165 |
| 859403 | N/A | N/A | CTGGTTTTCCCAGCTC | 73 | 5899 | 5914 | 166 |
| 859407 | N/A | N/A | ACCTCTGGTTTTCCCA | 77 | 5903 | 5918 | 167 |
| 859411 | N/A | N/A | TTCCACCTCTGGTTTT | 23 | 5907 | 5922 | 168 |
| 859415 | N/A | N/A | CTTGTCTGCTCCAACT | 22 | 6717 | 6732 | 169 |
| 859419 | N/A | N/A | AGCTCTTGTCTGCTCC | 81 | 6721 | 6736 | 170 |
| 859423 | N/A | N/A | ATTGAGGGAAAAAATC | 12 | 7468 | 7483 | 171 |
| 859427 | N/A | N/A | CCTGCAAGTCCCTGCT | 42 | 11241 | 11256 | 172 |
| 859431 | N/A | N/A | GCCACCTGCAAGTCCC | 47 | 11245 | 11260 | 173 |
| 859435 | N/A | N/A | ATTCTCTCCTCAGGCC | 52 | 11292 | 11307 | 174 |
| 859439 | N/A | N/A | GACCCACCACATTGCA | 48 | 11381 | 11396 | 175 |
| 859443 | N/A | N/A | CATGGACCCACCACAT | 25 | 11385 | 11400 | 176 |
| 859447 | N/A | N/A | GTTGCATGGACCCACC | 65 | 11389 | 11404 | 177 |
| 859451 | N/A | N/A | AGTAGCCCCCCAACTT | 0 | 11606 | 11621 | 178 |
| 859455 | N/A | N/A | ACACAGTAGCCCCCCA | 42 | 11610 | 11625 | 179 |
| 859459 | N/A | N/A | AGTCACACAGTAGCCC | 83 | 11614 | 11629 | 180 |
| 859463 | N/A | N/A | CACACAGTTTGGGTGT | 37 | 11636 | 11651 | 181 |
| 859467 | N/A | N/A | ATATGCAAGGTCACAC | 49 | 11647 | 11662 | 182 |
| 859471 | N/A | N/A | AGACATATGCAAGGTC | 46 | 11651 | 11666 | 183 |
| 859475 | N/A | N/A | TGTCCCTCTTGGTCTC | 61 | 11948 | 11963 | 184 |
| 859479 | N/A | N/A | CCAGTGTCCCTCTTGG | 35 | 11952 | 11967 | 185 |
| 859483 | N/A | N/A | TCTGCCAGTGTCCCTC | 27 | 11956 | 11971 | 186 |
| 859487 | N/A | N/A | TGTGATCCTCTGCCAG | 42 | 11964 | 11979 | 187 |
| 859491 | N/A | N/A | TCTCTGTGATCCTCTG | 73 | 11968 | 11983 | 188 |
| 859495 | N/A | N/A | TCTAGGGCCCATGCTT | 21 | 12668 | 12683 | 189 |
| 859499 | N/A | N/A | CCAGCTCTAGGGCCCA | 53 | 12673 | 12688 | 190 |
| 859503 | N/A | N/A | GGCAGCCAGCTCTAGG | 42 | 12678 | 12693 | 191 |
| 859507 | N/A | N/A | CGCACAGTGGGTGCTC | 41 | 12930 | 12945 | 192 |
| 859511 | N/A | N/A | GGTTAATAATGCCCCC | 58 | 13180 | 13195 | 193 |
| 859515 | N/A | N/A | GCCTGGTTAATAATGC | 0 | 13184 | 13199 | 194 |
| 859519 | N/A | N/A | CTGAGTGTGTTAGGAG | 52 | 14471 | 14486 | 195 |
| 859523 | N/A | N/A | CTCTCTGAGTGTGTTA | 57 | 14475 | 14490 | 196 |
| 859527 | N/A | N/A | TGCTGAGCAGGTCCTT | 47 | 14538 | 14553 | 197 |
| 859531 | N/A | N/A | TAGCATGCTGAGCAGG | 79 | 14543 | 14558 | 198 |
| 859535 | N/A | N/A | TTCTGTAGCATGCTGA | 50 | 14548 | 14563 | 199 |
| 859539 | N/A | N/A | CAATTCAGTGGCTGCT | 62 | 14757 | 14772 | 200 |
| 859543 | N/A | N/A | ACAGAGCAATTCAGTG | 49 | 14763 | 14778 | 201 |
| 468460 | 1075 | 1090 | TTGGCCACGCCGGCAT | 29 | 16705 | 16720 | 48 |
| 859547 | N/A | N/A | ACTATTTAGCAGCTAC | 65 | 17444 | 17459 | 202 |
| 859551 | N/A | N/A | GTCAACTATTTAGCAG | 73 | 17448 | 17463 | 203 |
| 859555 | N/A | N/A | CTAGGTTACCGCTGTC | 60 | 20916 | 20931 | 204 |
| 859559 | N/A | N/A | GGGACCTAGGTTACCG | 31 | 20921 | 20936 | 205 |
| 859312 | 1495 | 1510 | CTCTGTGACACAAAGC | 69 | 21467 | 21482 | 206 |
| 859316 | 1501 | 1516 | GTCCCACTCTGTGACA | 66 | 21473 | 21488 | 207 |
| 859563 | N/A | N/A | GCACTGTCCTGCAGCC | 44 | 22878 | 22893 | 208 |
| 859567 | N/A | N/A | ATCCAGCACTGTCCTG | 47 | 22883 | 22898 | 209 |
| 859571 | N/A | N/A | CTTTTTTGCTGGTTTG | 77 | 23032 | 23047 | 210 |
| 859575 | N/A | N/A | TCCACTTTTTTGCTGG | 0 | 23036 | 23051 | 211 |
| 859579 | N/A | N/A | TGTGCACTATCCTGTA | 39 | 23066 | 23081 | 212 |
| 859583 | N/A | N/A | GCATCTGTGCACTATC | 73 | 23071 | 23086 | 213 |
| 859587 | N/A | N/A | AGATGGCATCTGTGCA | 65 | 23076 | 23091 | 214 |
| 859591 | N/A | N/A | GCCTCTCACACGAGCA | 57 | 23179 | 23194 | 215 |
| 859595 | N/A | N/A | ACTCTGCCTCTCACAC | 27 | 23184 | 23199 | 216 |
| 859599 | N/A | N/A | TTTTCGACACAGGGTA | 69 | 24223 | 24238 | 217 |
| 859603 | N/A | N/A | CATGTTTTCGACACAG | 69 | 24227 | 24242 | 218 |
| 859607 | N/A | N/A | CTTTTCAGTACTCTAT | 28 | 26513 | 26528 | 219 |
| 859611 | N/A | N/A | CGCATCTTTTCAGTAC | 70 | 26518 | 26533 | 220 |
| 859615 | N/A | N/A | TCCATCGCATCTTTTC | 51 | 26523 | 26538 | 221 |
| 859320 | 2425 | 2440 | CACTGGAGCTCCTGGG | 45 | 27568 | 27583 | 222 |
| 859323 | 2431 | 2446 | GGCTGTCACTGGAGCT | 33 | 27574 | 27589 | 223 |
| 859327 | 2498 | 2513 | CAAGTCGGAACCATTT | 52 | 27641 | 27656 | 224 |
| 859331 | 2503 | 2518 | AGGGACAAGTCGGAAC | 28 | 27646 | 27661 | 225 |
| 859335 | 3459 | 3474 | CTCCGCCAGGCCAGTG | 25 | 28602 | 28617 | 226 |
| 859339 | 3463 | 3478 | GCATCTCCGCCAGGCC | 56 | 28606 | 28621 | 227 |
| 859343 | 3467 | 3482 | AGAAGCATCTCCGCCA | 63 | 28610 | 28625 | 228 |
| 859347 | 3474 | 3489 | ATGCCTTAGAAGCATC | 8 | 28617 | 28632 | 229 |
| 859351 | 3478 | 3493 | GACCATGCCTTAGAAG | 30 | 28621 | 28636 | 230 |
| 859355 | 3541 | 3556 | AAATGTCTGCTTGCTT | 51 | 28684 | 28699 | 231 |
| 859359 | 3589 | 3604 | AGAAAAGTTGGCTGTA | 37 | 28732 | 28747 | 232 |
| 859363 | 3595 | 3610 | AGGTCTAGAAAAGTTG | 74 | 28738 | 28753 | 233 |
| 859367 | 3604 | 3619 | AAGCAAAACAGGTCTA | 37 | 28747 | 28762 | 234 |
| 859371 | 3633 | 3648 | AACCCAGAATAAATAT | 30 | 28776 | 28791 | 235 |

TABLE 4
Inhibition of PCSK9 mRNA by 3-10-3 cEt gapmers
targeting SEQ ID NO: 1 and 2

| | SEQ | SEQ | | | SEQ | SEQ | |
|---|---|---|---|---|---|---|---|
| | ID: 1 | ID: 1 | | | ID: 2 | ID 2: | |
| | Start | Stop | | % | Start | Stop | SEQ |
| ISIS No | Site | Site | Sequence | inhibition | Site | Site | ID NO |
| 431131 | 1015 | 1034 | GTCACACTTGCTGGCCTGTC | 0 | N/A | N/A | 3 |
| 468460 | 1075 | 1090 | TTGGCCACGCCGGCAT | 25 | 16705 | 16720 | 48 |
| 859313 | 1497 | 1512 | CACTCTGTGACACAAA | 59 | 21469 | 21484 | 236 |
| 859317 | 1502 | 1517 | TGTCCCACTCTGTGAC | 10 | 21474 | 21489 | 237 |
| 859321 | 2428 | 2443 | TGTCACTGGAGCTCCT | 17 | 27571 | 27586 | 238 |
| 859324 | 2432 | 2447 | GGGCTGTCACTGGAGC | 46 | 27575 | 27590 | 239 |
| 859328 | 2499 | 2514 | ACAAGTCGGAACCATT | 6 | 27642 | 27657 | 240 |
| 859332 | 2504 | 2519 | GAGGGACAAGTCGGAA | 1 | 27647 | 27662 | 241 |
| 859336 | 3460 | 3475 | TCTCCGCCAGGCCAGT | 20 | 28603 | 28618 | 242 |
| 859340 | 3464 | 3479 | AGCATCTCCGCCAGGC | 60 | 28607 | 28622 | 243 |
| 859344 | 3468 | 3483 | TAGAAGCATCTCCGCC | 59 | 28611 | 28626 | 244 |
| 859348 | 3475 | 3490 | CATGCCTTAGAAGCAT | 0 | 28618 | 28633 | 245 |
| 859352 | 3480 | 3495 | CCGACCATGCCTTAGA | 63 | 28623 | 28638 | 246 |
| 859356 | 3542 | 3557 | TAAATGTCTGCTTGCT | 67 | 28685 | 28700 | 247 |
| 859360 | 3591 | 3606 | CTAGAAAAGTTGGCTG | 59 | 28734 | 28749 | 248 |
| 859364 | 3596 | 3611 | CAGGTCTAGAAAAGTT | 44 | 28739 | 28754 | 249 |
| 859368 | 3605 | 3620 | AAAGCAAAACAGGTCT | 62 | 28748 | 28763 | 250 |
| 859372 | N/A | N/A | TGCCGTCCTTCCCACC | 17 | 4560 | 4575 | 251 |
| 859376 | N/A | N/A | GCATCTGCCGTCCTTC | 40 | 4565 | 4580 | 252 |
| 859380 | N/A | N/A | TCCCAGCATCTGCCGT | 49 | 4570 | 4585 | 253 |
| 859384 | N/A | N/A | GACTTGTCAAGCACCA | 83 | 5014 | 5029 | 254 |
| 859388 | N/A | N/A | AAGTGACTTGTCAAGC | 77 | 5018 | 5033 | 255 |
| 859392 | N/A | N/A | CATTGTAAGTTCACTC | 77 | 5137 | 5152 | 256 |
| 859396 | N/A | N/A | CTTGCATTGTAAGTTC | 65 | 5141 | 5156 | 257 |
| 859400 | N/A | N/A | TTTCCCAGCTCTGTAT | 28 | 5894 | 5909 | 258 |
| 859404 | N/A | N/A | TCTGGTTTTCCCAGCT | 48 | 5900 | 5915 | 259 |
| 859408 | N/A | N/A | CACCTCTGGTTTTCCC | 78 | 5904 | 5919 | 260 |
| 859412 | N/A | N/A | CTTCCACCTCTGGTTT | 28 | 5908 | 5923 | 261 |
| 859416 | N/A | N/A | TCTTGTCTGCTCCAAC | 13 | 6718 | 6733 | 262 |
| 859420 | N/A | N/A | TAGCTCTTGTCTGCTC | 39 | 6722 | 6737 | 263 |
| 859424 | N/A | N/A | ACCCTAGGTGTACTTT | 27 | 7779 | 7794 | 264 |
| 859428 | N/A | N/A | ACCTGCAAGTCCCTGC | 31 | 11242 | 11257 | 265 |
| 859432 | N/A | N/A | TGCCACCTGCAAGTCC | 44 | 11246 | 11261 | 266 |
| 859436 | N/A | N/A | CATTCTCTCCTCAGGC | 38 | 11293 | 11308 | 267 |
| 859440 | N/A | N/A | GGACCCACCACATTGC | 19 | 11382 | 11397 | 268 |
| 859444 | N/A | N/A | GCATGGACCCACCACA | 56 | 11386 | 11401 | 269 |
| 859448 | N/A | N/A | TGTTGCATGGACCCAC | 53 | 11390 | 11405 | 270 |
| 859452 | N/A | N/A | CAGTAGCCCCCCAACT | 19 | 11607 | 11622 | 271 |
| 859456 | N/A | N/A | CACACAGTAGCCCCCC | 56 | 11611 | 11626 | 272 |
| 859460 | N/A | N/A | AAGTCACACAGTAGCC | 32 | 11615 | 11630 | 273 |
| 859464 | N/A | N/A | GTCACACAGTTTGGGT | 69 | 11638 | 11653 | 274 |
| 859468 | N/A | N/A | CATATGCAAGGTCACA | 59 | 11648 | 11663 | 275 |
| 859472 | N/A | N/A | TCAGACATATGCAAGG | 72 | 11653 | 11668 | 276 |
| 859476 | N/A | N/A | GTGTCCCTCTTGGTCT | 67 | 11949 | 11964 | 277 |
| 859480 | N/A | N/A | GCCAGTGTCCCTCTTG | 46 | 11953 | 11968 | 278 |
| 859484 | N/A | N/A | CCTCTGCCAGTGTCCC | 34 | 11958 | 11973 | 279 |
| 859488 | N/A | N/A | CTGTGATCCTCTGCCA | 58 | 11965 | 11980 | 280 |
| 859492 | N/A | N/A | GTCTCTGTGATCCTCT | 71 | 11969 | 11984 | 281 |
| 859496 | N/A | N/A | GCTCTAGGGCCCATGC | 16 | 12670 | 12685 | 282 |
| 859500 | N/A | N/A | GCCAGCTCTAGGGCCC | 16 | 12674 | 12689 | 283 |
| 859504 | N/A | N/A | AGAGAAATGCATGCTA | 68 | 12841 | 12856 | 284 |
| 859508 | N/A | N/A | GGCGCACAGTGGGTGC | 0 | 12932 | 12947 | 285 |
| 859512 | N/A | N/A | TGGTTAATAATGCCCC | 40 | 13181 | 13196 | 286 |
| 859516 | N/A | N/A | TTGCCTGGTTAATAAT | 12 | 13186 | 13201 | 287 |
| 859520 | N/A | N/A | TCTGAGTGTGTTAGGA | 62 | 14472 | 14487 | 288 |
| 859524 | N/A | N/A | GCTCTCTGAGTGTGTT | 56 | 14476 | 14491 | 289 |
| 859528 | N/A | N/A | CATGCTGAGCAGGTCC | 66 | 14540 | 14555 | 290 |
| 859532 | N/A | N/A | GTAGCATGCTGAGCAG | 79 | 14544 | 14559 | 291 |
| 859536 | N/A | N/A | TCAGTGGCTGCTCTGA | 24 | 14753 | 14768 | 292 |
| 859540 | N/A | N/A | GCAATTCAGTGGCTGC | 33 | 14758 | 14773 | 293 |
| 859544 | N/A | N/A | TAGTTAACACACAGAA | 17 | 16208 | 16223 | 294 |
| 859548 | N/A | N/A | AACTATTTAGCAGCTA | 43 | 17445 | 17460 | 295 |
| 859552 | N/A | N/A | CGTCAACTATTTAGCA | 66 | 17449 | 17464 | 296 |
| 859556 | N/A | N/A | CCTAGGTTACCGCTGT | 33 | 20917 | 20932 | 297 |
| 859560 | N/A | N/A | GCACAGACCCTGACTG | 23 | 21567 | 21582 | 298 |
| 859564 | N/A | N/A | AGCACTGTCCTGCAGC | 48 | 22879 | 22894 | 299 |
| 859568 | N/A | N/A | TTTTGCTGGTTTGAGA | 52 | 23029 | 23044 | 300 |
| 859572 | N/A | N/A | ACTTTTTTGCTGGTTT | 70 | 23033 | 23048 | 301 |
| 859576 | N/A | N/A | ATTCCACTTTTTTGCT | 24 | 23038 | 23053 | 302 |
| 859580 | N/A | N/A | TCTGTGCACTATCCTG | 38 | 23068 | 23083 | 303 |
| 859584 | N/A | N/A | GGCATCTGTGCACTAT | 75 | 23072 | 23087 | 304 |
| 859588 | N/A | N/A | TCACACGAGCATTAAG | 34 | 23174 | 23189 | 305 |
| 859592 | N/A | N/A | TGCCTCTCACACGAGC | 38 | 23180 | 23195 | 306 |
| 859596 | N/A | N/A | TAGACAGGATCAACTC | 18 | 23406 | 23421 | 307 |
| 859600 | N/A | N/A | GTTTTCGACACAGGGT | 61 | 24224 | 24239 | 308 |
| 859604 | N/A | N/A | GCATGTTTTCGACACA | 63 | 24228 | 24243 | 309 |
| 859608 | N/A | N/A | ATCTTTTCAGTACTCT | 48 | 26515 | 26530 | 310 |
| 859612 | N/A | N/A | TCGCATCTTTTCAGTA | 31 | 26519 | 26534 | 311 |
| 859616 | N/A | N/A | AGCAGCTAGGCCACAG | 20 | 26841 | 26856 | 312 |

### Study 2

[0339] Cultured HepG2 cells at a density of 20,000 cells per well were transfected using electroporation with 3,000 nM antisense oligonucleotide. After a treatment period of approximately 24 hours, RNA was isolated from the cells and PCSK9 mRNA levels were measured by quantitative real-time PCR. Human PCSK9 primer probe set from ABI (ID4 Hs03037355_m1) was used to measure mRNA levels. PCSK9 mRNA levels were adjusted according to total RNA content, as measured by RIBOGREEN®. Results are presented as percent inhibition of PCSK9, relative to untreated control cells.

TABLE 5
Inhibition of PCSK9 mRNA by 3-10-3 cEt gapmers
targeting SEQ ID NO: 1 and 2

| | SEQ | SEQ | | | SEQ | SEQ | |
|---|---|---|---|---|---|---|---|
| | ID: 1 | ID: 1 | | | ID: 2 | ID 2: | |
| | Start | Stop | | % | Start | Stop | SEQ |
| ISIS No | Site | Site | Sequence | inhibition | Site | Site | ID NO |
| 848304 | 757 | 772 | AACTTCAAGGCCAGCT | 66 | N/A | N/A | 313 |
| 848215 | 108 | 123 | CTGAACTGAACGGCGG | 68 | 3583 | 3598 | 314 |
| 848231 | 320 | 335 | GGCGAGGAGACCTAGA | 87 | 3795 | 3810 | 315 |
| 848247 | 485 | 500 | ACGCAAGGCTAGCACC | 77 | 3960 | 3975 | 316 |
| 848788 | N/A | N/A | GGCAAGCCCGCTTTCT | 88 | 4456 | 4471 | 317 |
| 848804 | N/A | N/A | CCCTTTTAAAGATTAG | 67 | 5053 | 5068 | 318 |
| 848820 | N/A | N/A | CCAGAGAAGAAACATC | 62 | 5524 | 5539 | 319 |
| 848836 | N/A | N/A | AAGAATCTGGAGCTGC | 84 | 6430 | 6445 | 320 |
| 848852 | N/A | N/A | CACTGAGGACCAAATT | 65 | 6806 | 6821 | 321 |
| 848868 | N/A | N/A | GCTATATAAAGGAATA | 65 | 7161 | 7176 | 322 |
| 848884 | N/A | N/A | CATGAGCAAGTCACTC | 65 | 7387 | 7402 | 323 |
| 848900 | N/A | N/A | AGTATAGTAGATGATA | 82 | 7720 | 7735 | 324 |
| 848262 | 614 | 629 | CGAGAGGTGGGTCTCC | 54 | 7887 | 7902 | 325 |
| 466848 | 673 | 688 | GTGAGGTATCCCCGGC | 88 | 7946 | 7961 | 326 |
| 848289 | 689 | 704 | GACATGCAGGATCTTG | 79 | 7962 | 7977 | 327 |
| 848916 | N/A | N/A | GGGAATTCTATACAGA | 72 | 8193 | 8208 | 328 |
| 848932 | N/A | N/A | CACCGAAGATGTGACA | 51 | 8521 | 8536 | 329 |
| 848948 | N/A | N/A | AAGGGAAAGGCCTGAG | 53 | 9040 | 9055 | 330 |
| 848964 | N/A | N/A | CCCCACAGGCAGCCTC | 61 | 9610 | 9625 | 331 |
| 848980 | N/A | N/A | CCGGAGGACAGACTAG | 27 | 10368 | 10383 | 332 |
| 848319 | 862 | 877 | TGGTATTCATCCGCCC | 60 | 10623 | 10638 | 333 |
| 848996 | N/A | N/A | AGCCAAACGGAGCTGG | 51 | 11093 | 11108 | 334 |
| 849012 | N/A | N/A | AAAGGAACAGGCTCTT | 56 | 11842 | 11857 | 335 |
| 849028 | N/A | N/A | CTCTAGGGCCCATGCT | 56 | 12669 | 12684 | 336 |
| 849044 | N/A | N/A | GGATACACAGGCTCGC | 96 | 13108 | 13123 | 337 |
| 849060 | N/A | N/A | GATGATGTGACCACTG | 86 | 13864 | 13879 | 338 |
| 849076 | N/A | N/A | GGCCAGCAAGGTGGGC | 35 | 14277 | 14292 | 339 |
| 849092 | N/A | N/A | TGCTAGTAGGTCTGGG | 72 | 14675 | 14690 | 340 |
| 849108 | N/A | N/A | CCAAAGGAAGACTTCA | 70 | 15400 | 15415 | 341 |
| 849124 | N/A | N/A | ATTTAAAGACTCAAAG | 16 | 15870 | 15885 | 342 |
| 849140 | N/A | N/A | ACATTTGTGGGAGAGG | 56 | 16250 | 16265 | 343 |
| 848334 | 984 | 999 | CGTCCTCCTCGGGCAC | 85 | 16376 | 16391 | 344 |
| 848348 | 1018 | 1033 | TCACACTTGCTGGCCT | 52 | 16648 | 16663 | 345 |
| 848364 | 1061 | 1076 | ATCCCGGCCGCTGACC | 57 | 16691 | 16706 | 346 |
| 468460 | 1075 | 1090 | TTGGCCACGCCGGCAT | 48 | 16705 | 16720 | 48 |
| 848379 | 1085 | 1100 | GCTGGCACCCTTGGCC | 57 | 16715 | 16730 | 347 |
| 849156 | N/A | N/A | AAGACATAAAGACATC | 89 | 17083 | 17098 | 348 |
| 849172 | N/A | N/A | CAGAAGGTTATTGATT | 68 | 17735 | 17750 | 349 |
| 849188 | N/A | N/A | TGCTAGTTATTAAGCA | 15 | 18080 | 18095 | 350 |
| 849204 | N/A | N/A | CAGTAACAGCTCTTTT | 80 | 19020 | 19035 | 351 |
| 849220 | N/A | N/A | CCTTATTATCCCTTTC | 70 | 19396 | 19411 | 352 |
| 849236 | N/A | N/A | CAACATCAAATTCTGC | 92 | 19658 | 19673 | 353 |
| 848395 | 1165 | 1180 | TTCCGAATAAACTCCA | 73 | 19996 | 20011 | 354 |
| 848411 | 1345 | 1360 | ACCTCGGGAGCTGAGG | 20 | 20176 | 20191 | 355 |
| 849252 | N/A | N/A | GATGGAGGTTTCGAGC | 87 | 20381 | 20396 | 356 |
| 849268 | N/A | N/A | TATCAAGTGGTTCTAA | 44 | 21039 | 21054 | 357 |
| 848427 | 1458 | 1473 | CACCAATGATGTCCTC | 45 | 21430 | 21445 | 358 |
| 849284 | N/A | N/A | TCTTATCGGCCAGGTG | 75 | 21810 | 21825 | 359 |
| 848443 | 1608 | 1623 | TGGCAGAGAAGTGGAT | 21 | 22101 | 22116 | 360 |
| 848459 | 1730 | 1745 | CCATACAGTCCTGCAA | 40 | 22512 | 22527 | 361 |
| 848475 | 1807 | 1822 | GAGCAGCTCAGCAGCT | 44 | 22589 | 22604 | 362 |
| 849300 | N/A | N/A | TACAGAAGAGCTGGAG | 61 | 22767 | 22782 | 363 |
| 849316 | N/A | N/A | ACACAGAGTGGTTTCA | 79 | 23262 | 23277 | 364 |
| 848489 | 1951 | 1966 | CTGCAGTTGGCCTGGG | 57 | 23571 | 23586 | 365 |
| 848505 | 2006 | 2021 | GTGGCAGTGGACACGG | 71 | 23626 | 23641 | 366 |
| 849332 | N/A | N/A | AGGAGAAGTAAGGTCA | 91 | 23828 | 23843 | 367 |
| 849348 | N/A | N/A | GGGCATGTTTTCGACA | 65 | 24230 | 24245 | 368 |
| 849364 | N/A | N/A | TTCCACCCAGAGATGG | 34 | 25105 | 25120 | 369 |
| 849380 | N/A | N/A | CGGTATGGTGGTGGCA | 71 | 25630 | 25645 | 370 |
| 849396 | N/A | N/A | GGGCAAGTGGATCCAA | 38 | 26364 | 26379 | 371 |
| 849412 | N/A | N/A | CCACACTTCATTTCTC | 35 | 27298 | 27313 | 372 |
| 848521 | 2225 | 2240 | GCAGGCCACGGTCACC | 67 | 27368 | 27383 | 373 |
| 848537 | 2483 | 2498 | TTAAAGCTCAGCCCCA | 67 | 27626 | 27641 | 374 |
| 848553 | 2560 | 2575 | CCCCGGAAAGGCGGAA | 39 | 27703 | 27718 | 375 |
| 848569 | 2704 | 2719 | CCGAGCACAGCTCGAC | 62 | 27847 | 27862 | 376 |
| 848584 | 2739 | 2754 | ACGGACATCGGCACAT | 92 | 27882 | 27897 | 377 |
| 848600 | 2776 | 2791 | GGCACGGAACAAGAGC | 87 | 27919 | 27934 | 378 |
| 848616 | 2888 | 2903 | ACCTTTCACACTCACC | 92 | 28031 | 28046 | 379 |
| 468491 | 2971 | 2986 | TGCCATCCAGAAAGCT | 64 | 28114 | 28129 | 380 |
| 848646 | 3085 | 3100 | CACCTTTGGGTGTTGC | 80 | 28228 | 28243 | 381 |
| 848662 | 3132 | 3147 | CCACTGCACACTGCCG | 87 | 28275 | 28290 | 382 |
| 848678 | 3220 | 3235 | TGGTTCCAGGTTTCTT | 87 | 28363 | 28378 | 383 |
| 848693 | 3253 | 3268 | CCTGCTGTGTGAGCTT | 93 | 28396 | 28411 | 384 |
| 848709 | 3290 | 3305 | CTTCAGAGCCAGCCCA | 65 | 28433 | 28448 | 385 |
| 848725 | 3380 | 3395 | CCGAGCTTCCTGGTCT | 92 | 28523 | 28538 | 386 |
| 848741 | 3433 | 3448 | GGGTGATAACGGAAAA | 62 | 28576 | 28591 | 387 |
| 848756 | 3547 | 3562 | AAAGATAAATGTCTGC | 92 | 28690 | 28705 | 388 |
| 848772 | 3631 | 3646 | CCCAGAATAAATATCT | 89 | 28774 | 28789 | 389 |

TABLE 6
Inhibition of PCSK9 mRNA by 3-10-3 cEt gapmers targeting SEQ ID NO: 1 and 2

| | SEQ | SEQ | | | SEQ | SEQ | |
|---|---|---|---|---|---|---|---|
| | ID: 1 | ID: 1 | | | ID: 2 | ID 2: | |
| | Start | Stop | | PCSK9 | Start | Stop | SEQ |
| ISIS No | Site | Site | Sequence | (% inhibition) | Site | Site | ID NO |
| 848216 | 123 | 138 | CTCCAGGCTCAGACCC | 82 | 3598 | 3613 | 390 |
| 848232 | 353 | 368 | GCCCATGAGGGCCAGG | 67 | 3828 | 3843 | 391 |
| 848248 | 486 | 501 | AACGCAAGGCTAGCAC | 62 | 3961 | 3976 | 392 |
| 848789 | N/A | N/A | CTATAATGGCAAGCCC | 76 | 4463 | 4478 | 393 |
| 848805 | N/A | N/A | CGTAGGGACGATTGTC | 65 | 5073 | 5088 | 394 |
| 848821 | N/A | N/A | ATGAACTTGAGGAGGC | 85 | 5558 | 5573 | 395 |
| 848837 | N/A | N/A | TTGGAAGAATCTGGAG | 81 | 6434 | 6449 | 396 |
| 848853 | N/A | N/A | CAACACTGAGGACCAA | 77 | 6809 | 6824 | 397 |
| 848869 | N/A | N/A | GGCAACACTTCTTAAA | 60 | 7219 | 7234 | 398 |
| 848885 | N/A | N/A | GTGCAGCCATGAGCAA | 73 | 7394 | 7409 | 399 |
| 848901 | N/A | N/A | ACAGAGTATAGTAGAT | 73 | 7724 | 7739 | 400 |
| 848263 | 616 | 631 | TGCGAGAGGTGGGTCT | 42 | 7889 | 7904 | 401 |
| 848275 | 674 | 689 | GGTGAGGTATCCCCGG | 67 | 7947 | 7962 | 402 |
| 848290 | 690 | 705 | AGACATGCAGGATCTT | 56 | 7963 | 7978 | 403 |
| 848917 | N/A | N/A | TCAAATGAAGATAGAC | 68 | 8237 | 8252 | 404 |
| 848933 | N/A | N/A | GAATACCCAGTCCCCT | 49 | 8548 | 8563 | 405 |
| 848949 | N/A | N/A | CTCAAGGGAAAGGCCT | 59 | 9043 | 9058 | 406 |
| 848965 | N/A | N/A | CATGGCAGCGGTGAAC | 47 | 9638 | 9653 | 407 |
| 848981 | N/A | N/A | GATCAAACCTGTCCCC | 42 | 10427 | 10442 | 408 |
| 848997 | N/A | N/A | TGCAGACCGTTTTCCA | 83 | 11221 | 11236 | 409 |
| 849013 | N/A | N/A | GGAAAGGAACAGGCTC | 88 | 11844 | 11859 | 410 |
| 849029 | N/A | N/A | TTTGAGGGCGGCAGCC | 32 | 12687 | 12702 | 411 |
| 849045 | N/A | N/A | TGCTGGATACACAGGC | 79 | 13112 | 13127 | 412 |
| 849061 | N/A | N/A | TGTACCTGGGTTCTGC | 86 | 13885 | 13900 | 413 |
| 849077 | N/A | N/A | CACTAGATATTGAGCT | 55 | 14329 | 14344 | 414 |
| 849093 | N/A | N/A | CTATGCTAGTAGGTCT | 51 | 14678 | 14693 | 415 |
| 849109 | N/A | N/A | GGCCAAAGGAAGACTT | 22 | 15402 | 15417 | 416 |
| 849125 | N/A | N/A | CTGCAAGAAAGACAAC | 73 | 1588 | 15904 | 417 |
| 848320 | 887 | 902 | CACCAGGCTGCCTCCG | 49 | 16279 | 16294 | 418 |
| 848335 | 985 | 1000 | CCGTCCTCCTCGGGCA | 8 | 16377 | 16392 | 419 |
| 849141 | N/A | N/A | CATCAGACGGCCGTGC | 40 | 16416 | 16431 | 420 |
| 848349 | 1019 | 1034 | GTCACACTTGCTGGCC | 62 | 16649 | 16664 | 421 |
| 468459 | 1063 | 1078 | GCATCCCGGCCGCTGA | 76 | 16693 | 16708 | 422 |
| 468460 | 1075 | 1090 | TTGGCCACGCCGGCAT | 46 | 16705 | 16720 | 48 |
| 848380 | 1091 | 1106 | GCGCATGCTGGCACCC | 45 | 16721 | 16736 | 423 |
| 849157 | N/A | N/A | GATAACATAACAAAAG | 29 | 17096 | 17111 | 424 |
| 849173 | N/A | N/A | GCAGAAGGTTATTGAT | 64 | 17736 | 17751 | 425 |
| 849189 | N/A | N/A | ACAGCTGCTAGTTATT | 96 | 18085 | 18100 | 426 |
| | | | | | 18398 | 18413 | |
| 849205 | N/A | N/A | TGCTACTGTCAACAGT | 86 | 19032 | 19047 | 427 |
| 849221 | N/A | N/A | CAATAACCTTATTATC | 6 | 19402 | 19417 | 428 |
| 849237 | N/A | N/A | AGAGAACAGACTGAGG | 83 | 19727 | 19742 | 429 |
| 848396 | 1170 | 1185 | GGCTTTTCCGAATAAA | 43 | 20001 | 20016 | 430 |
| 849253 | N/A | N/A | GGCAGAGGACGCAGGG | 40 | 20538 | 20553 | 431 |
| 849269 | N/A | N/A | ACTATTCGGTGTATCA | 82 | 21050 | 21065 | 432 |
| 848428 | 1466 | 1481 | GCTGGAGGCACCAATG | 0 | 21438 | 21453 | 433 |
| 849285 | N/A | N/A | GTCTTATCGGCCAGGT | 86 | 21811 | 21826 | 434 |
| 848444 | 1617 | 1632 | TGACATCTTTGGCAGA | 39 | 22110 | 22125 | 435 |
| 848460 | 1731 | 1746 | ACCATACAGTCCTGCA | 19 | 22513 | 22528 | 436 |
| 848476 | 1814 | 1829 | GAAACTGGAGCAGCTC | 54 | 22596 | 22611 | 437 |
| 849301 | N/A | N/A | CATTGAAAATCCATCC | 83 | 22895 | 22910 | 438 |
| 849317 | N/A | N/A | CCCAAGGAAGACTGTT | 56 | 23318 | 23333 | 439 |
| 848490 | 1977 | 1992 | CCTCAGCTGGTGGAGC | 54 | 23597 | 23612 | 440 |
| 848506 | 2007 | 2022 | GGTGGCAGTGGACACG | 46 | 23627 | 23642 | 441 |
| 849333 | N/A | N/A | AGGTAATACCTTTTTC | 51 | 23871 | 23886 | 442 |
| 849349 | N/A | N/A | CACCATCCCTTGATGC | 46 | 24285 | 24300 | 443 |
| 849365 | N/A | N/A | GAAAACACCATCTTTC | 26 | 25118 | 25133 | 444 |
| 849381 | N/A | N/A | GGCGGTATGGTGGTGG | 71 | 25632 | 25647 | 445 |
| 849397 | N/A | N/A | ACCCAGGGCAAGTGGA | 56 | 26369 | 26384 | 446 |
| 849413 | N/A | N/A | CCCCACCCACACTTCA | 53 | 27304 | 27319 | 447 |
| 848522 | 2227 | 2242 | TCGCAGGCCACGGTCA | 69 | 27370 | 27385 | 448 |
| 848538 | 2485 | 2500 | TTTTAAAGCTCAGCCC | 38 | 27628 | 27643 | 449 |
| 848554 | 2565 | 2580 | AGCAGCCCCGGAAAGG | 67 | 27708 | 27723 | 450 |
| 848570 | 2706 | 2721 | ACCCGAGCACAGCTCG | 90 | 27849 | 27864 | 451 |
| 848585 | 2741 | 2756 | CCACGGACATCGGCAC | 93 | 27884 | 27899 | 452 |
| 848601 | 2777 | 2792 | TGGCACGGAACAAGAG | 54 | 27920 | 27935 | 453 |
| 848617 | 2898 | 2913 | GGCCATCAGCACCTTT | 63 | 28041 | 28056 | 454 |
| 848632 | 2976 | 2991 | CTAGATGCCATCCAGA | 91 | 28119 | 28134 | 455 |
| 848647 | 3088 | 3103 | GGCCACCTTTGGGTGT | 46 | 28231 | 28246 | 456 |
| 848663 | 3141 | 3156 | GTGCATGCACCACTGC | 78 | 28284 | 28299 | 457 |
| 848679 | 3221 | 3236 | CTGGTTCCAGGTTTCT | 88 | 28364 | 28379 | 458 |
| 848694 | 3254 | 3269 | TCCTGCTGTGTGAGCT | 91 | 28397 | 28412 | 459 |
| 848710 | 3302 | 3317 | GAAGAGGCTTGGCTTC | 17 | 28445 | 28460 | 460 |
| 848726 | 3381 | 3396 | ACCGAGCTTCCTGGTC | 38 | 28524 | 28539 | 461 |
| 848742 | 3438 | 3453 | GGCCTGGGTGATAACG | 26 | 28581 | 28596 | 462 |
| 848757 | 3550 | 3565 | CCAAAAGATAAATGTC | 46 | 28693 | 28708 | 463 |
| 848773 | 3638 | 3653 | TACAAAACCCAGAATA | 59 | 28781 | 28796 | 464 |
| 848305 | 758 | 773 | CAACTTCAAGGCCAGC | 79 | N/A | N/A | 465 |
| 848412 | 1349 | 1364 | GATGACCTCGGGAGCT | 38 | N/A | N/A | 466 |

### Study 3

[0340] Cultured HepG2 cells at a density of 20,000 cells per well were transfected using electroporation with 1,000 nM antisense oligonucleotide. After a treatment period of approximately 24 hours, RNA was isolated from the cells and PCSK9 mRNA levels were measured by quantitative real-time PCR. Human PCSK9 primer probe set from ABI (ID4 Hs03037355_m1) was used to measure mRNA levels. PCSK9 mRNA levels were adjusted according to total RNA content, as measured by RIBOGREEN®. Results are presented as percent inhibition of PCSK9, relative to untreated control cells.

TABLE 7
Inhibition of PCSK9 mRNA by 3-10-3 cEt gapmers targeting SEQ ID NO: 1 and 2

| | SEQ | SEQ | | | SEQ | SEQ | |
|---|---|---|---|---|---|---|---|
| | ID: 1 | ID: 1 | | | ID: 2 | ID 2: | |
| | Start | Stop | | PCSK9 | Start | Stop | SEQ |
| ISIS No | Site | Site | Sequence | (% inhibition) | Site | Site | ID NO |
| 848205 | 4 | 19 | CACCAGAGCCCCATCG | 3 | 3479 | 3494 | 467 |
| 848221 | 189 | 204 | CTGGGAGCCGCTGCTG | 42 | 3664 | 3679 | 468 |
| 848237 | 389 | 404 | TGGCAGCGGCCACCAG | 0 | 3864 | 3879 | 469 |
| 848253 | 506 | 521 | GGCCAGGCCGTCCTCC | 51 | 3981 | 3996 | 470 |
| 848778 | N/A | N/A | CCGCACCTTGGCGCAG | 0 | 4035 | 4050 | 471 |
| 848794 | N/A | N/A | GAAACAGATGGAATAC | 28 | 4626 | 4641 | 472 |
| 848810 | N/A | N/A | ACCCAGCACACTCAGA | 0 | 529 | 5306 | 473 |
| 848826 | N/A | N/A | GTACTCTGTGCAGTGG | 80 | 5748 | 5763 | 474 |
| 848842 | N/A | N/A | GAGTAGAACAGAGTCC | 54 | 6544 | 6559 | 475 |
| 848858 | N/A | N/A | TTAATAATCAGCCTTC | 46 | 6933 | 6948 | 476 |
| 848874 | N/A | N/A | TACAAATGCAGGCAGA | 40 | 7256 | 7271 | 477 |
| 848890 | N/A | N/A | CTCGACAACAGGTTTT | 65 | 7577 | 7592 | 478 |
| 848906 | N/A | N/A | AGGAACATGATGACAT | 0 | 7811 | 7826 | 479 |
| 848268 | 644 | 659 | CTGCAGGCGGCGGGCA | 0 | 7917 | 7932 | 480 |
| 848279 | 679 | 694 | ATCTTGGTGAGGTATC | 40 | 7952 | 7967 | 481 |
| 848294 | 695 | 710 | ATGGAAGACATGCAGG | 44 | 7968 | 7983 | 482 |
| 848922 | N/A | N/A | TAAAATGACTCAGGCT | 19 | 8406 | 8421 | 483 |
| 848938 | N/A | N/A | CATCAAGTTAGAGGCC | 49 | 8650 | 8665 | 484 |
| 848954 | N/A | N/A | TATACGGGTACCTTCT | 28 | 9143 | 9158 | 485 |
| 848970 | N/A | N/A | GCTCAGTGCAAACTGC | 0 | 10094 | 10109 | 486 |
| 848309 | 779 | 794 | CTCGATGTAGTCGACA | 62 | 10540 | 10555 | 487 |
| 848986 | N/A | N/A | CCCGAGAAGTGGAAAC | 12 | 10729 | 10744 | 488 |
| 849002 | N/A | N/A | CCAAGATCCCACGAGA | 56 | 11458 | 11473 | 489 |
| 849018 | N/A | N/A | GAGAAAGTGGTCCTGC | 35 | 12122 | 12137 | 490 |
| 849034 | N/A | N/A | CAGCAATAACTGATTT | 42 | 12825 | 12840 | 491 |
| 849044 | N/A | N/A | GGATACACAGGCTCGC | 83 | 13108 | 13123 | 337 |
| 849050 | N/A | N/A | CGCCTGAGAAGCTCAG | 44 | 13353 | 13368 | 492 |
| 849066 | N/A | N/A | CCACACAACGCACATC | 15 | 14043 | 14058 | 493 |
| 849082 | N/A | N/A | GACCAAACAGTGCTCG | 28 | 14360 | 14375 | 494 |
| 849098 | N/A | N/A | CTACAAAGACCTTTTC | 0 | 14849 | 14864 | 495 |
| 849114 | N/A | N/A | TAGGAGAAAGTAGGGA | 26 | 15533 | 15548 | 496 |
| 849130 | N/A | N/A | GAATATCAATATCTAA | 19 | 15983 | 15998 | 497 |
| 848325 | 931 | 946 | TCCCGGTGGTCACTCT | 2 | 16323 | 16338 | 498 |
| 848340 | 990 | 1005 | GGGTCCCGTCCTCCTC | 38 | 16382 | 16397 | 499 |
| 849146 | N/A | N/A | CCACATGAGAAAGACC | 0 | 16614 | 16629 | 500 |
| 848354 | 1026 | 1041 | CATGACTGTCACACTT | 23 | 16656 | 16671 | 501 |
| 848369 | 1074 | 1089 | TGGCCACGCCGGCATC | 17 | 16704 | 16719 | 502 |
| 468460 | 1075 | 1090 | TTGGCCACGCCGGCAT | 4 | 16705 | 16720 | 48 |
| 848385 | 1114 | 1129 | TGGCAGTTGAGCACGC | 0 | 16744 | 16759 | 503 |
| 849162 | N/A | N/A | GTCTAGAAAAAGTCCT | 65 | 17257 | 17272 | 504 |
| 849178 | N/A | N/A | CCGTGCCAGGTCATGC | 78 | 17957 | 17972 | 505 |
| 849194 | N/A | N/A | CTGGGATACAGACACC | 42 | 18254 | 18269 | 506 |
| 849210 | N/A | N/A | AATTAAAAGACTCCAT | 18 | 19154 | 19169 | 507 |
| 849226 | N/A | N/A | TATTAGCAATTACACC | 45 | 19502 | 19517 | 508 |
| 849242 | N/A | N/A | TTACAGGCACAGAGTG | 25 | 19914 | 19929 | 509 |
| 848401 | 1228 | 1243 | CTGTACCCACCCGCCA | 11 | 20059 | 20074 | 510 |
| 849258 | N/A | N/A | AACAAGATTCCTTCCC | 30 | 20814 | 20829 | 511 |
| 849274 | N/A | N/A | GGCAGAACTCTGGCAC | 56 | 21163 | 21178 | 512 |
| 848417 | 1402 | 1417 | CCCAAAGTCCCCAGGG | 0 | 21374 | 21389 | 513 |
| 849290 | N/A | N/A | GGTGAAAGATGGTGAT | 10 | 22003 | 22018 | 514 |
| 848433 | 1544 | 1559 | CATCATGGCTGCAATG | 0 | 22037 | 22052 | 515 |
| 848449 | 1636 | 1651 | GGGAACCAGGCCTCAT | 25 | 22129 | 22144 | 516 |
| 848465 | 1736 | 1751 | TGCTGACCATACAGTC | 0 | 22518 | 22533 | 517 |
| 849306 | N/A | N/A | GTGCACTATCCTGTAG | 28 | 23065 | 23080 | 518 |
| 849322 | N/A | N/A | CAAAGACGGAAATGGG | 44 | 23462 | 23477 | 519 |
| 848481 | 1925 | 1940 | GCACCTGGCAATGGCG | 34 | 23545 | 23560 | 520 |
| 848495 | 1993 | 2008 | CGGGTCCCCATGCTGG | 0 | 23613 | 23628 | 521 |
| 849338 | N/A | N/A | TGCTTAGCACTCATCA | 0 | 24102 | 24117 | 522 |
| 849354 | N/A | N/A | CCTACATGCCAGCCTG | 73 | 24472 | 24487 | 523 |
| 849370 | N/A | N/A | AAAGAGATGCTGGCCT | 28 | 25228 | 25243 | 524 |
| 848511 | 2082 | 2097 | GCACAGGCGGCTTGTG | 28 | 25413 | 25428 | 525 |
| 849386 | N/A | N/A | CCATATTTATGCACAT | 62 | 25806 | 25821 | 526 |
| 849402 | N/A | N/A | TTTCAGTACTCTATAT | 12 | 26511 | 26526 | 527 |
| 848527 | 2372 | 2387 | AACGGCTGTCACGGCC | 42 | 27515 | 27530 | 528 |
| 848543 | 2507 | 2522 | AGAGAGGGACAAGTCG | 47 | 27650 | 27665 | 529 |
| 848559 | 2603 | 2618 | TTCCAGGCAAGGAGGC | 23 | 27746 | 27761 | 530 |
| 848575 | 2712 | 2727 | GGCAGCACCCGAGCAC | 72 | 27855 | 27870 | 531 |
| 848590 | 2757 | 2772 | ATAAAAGTCATTCTGC | 15 | 27900 | 27915 | 532 |
| 848606 | 2787 | 2802 | ATTGAATGCCTGGCAC | 36 | 27930 | 27945 | 533 |
| 848622 | 2919 | 2934 | CCACAGTTAGCTGGAG | 45 | 28062 | 28077 | 534 |
| 848637 | 3036 | 3051 | GCTCAGGAAACCAAGG | 12 | 28179 | 28194 | 535 |
| 848652 | 3122 | 3137 | CTGCCGAGTCAGTCCT | 66 | 28265 | 28280 | 536 |
| 848668 | 3172 | 3187 | TGCCGGGTAGTGGAGC | 49 | 28315 | 28330 | 537 |
| 848683 | 3226 | 3241 | CCCCTCTGGTTCCAGG | 43 | 28369 | 28384 | 538 |
| 848699 | 3261 | 3276 | GCTCAGTTCCTGCTGT | 18 | 28404 | 28419 | 539 |
| 848715 | 3317 | 3332 | AGCCGGGTGAAGTAAG | 26 | 28460 | 28475 | 540 |
| 848731 | 3386 | 3401 | CACTCACCGAGCTTCC | 73 | 28529 | 28544 | 541 |
| 848747 | 3471 | 3486 | CCTTAGAAGCATCTCC | 52 | 28614 | 28629 | 542 |
| 848762 | 3576 | 3591 | GTAAAAAGGCAACAGA | 36 | 28719 | 28734 | 543 |

TABLE 8
Inhibition of PCSK9 mRNA by 3-10-3 cEt gapmers targeting SEQ ID NO: 1 and 2

| | SEQ | SEQ | | | SEQ | SEQ | |
|---|---|---|---|---|---|---|---|
| | ID: 1 | ID: 1 | | | ID: 2 | ID 2: | |
| | Start | Stop | | % | Start | Stop | SEQ |
| ISIS No | Site | Site | Sequence | inhibition | Site | Site | ID NO |
| 848206 | 7 | 22 | CGCCACCAGAGCCCCA | 30 | 3482 | 3497 | 544 |
| 848222 | 207 | 222 | CGGAATCCTGGCTGGG | 55 | 3682 | 3697 | 545 |
| 848238 | 476 | 491 | TAGCACCAGCTCCTCG | 53 | 3951 | 3966 | 546 |
| 848254 | 520 | 535 | TGCTCGGGTGCTTCGG | 35 | 3995 | 4010 | 547 |
| 848779 | N/A | N/A | GGCTGCGGGTTCGCCC | 13 | 4070 | 4085 | 548 |
| 848795 | N/A | N/A | CGAGAATACCTCCGCC | 73 | 4682 | 4697 | 549 |
| 848811 | N/A | N/A | GCTGAGTAAGGACTTG | 64 | 5317 | 5332 | 550 |
| 848827 | N/A | N/A | TTCCGCTAAATAAAAA | 9 | 5781 | 5796 | 551 |
| 848843 | N/A | N/A | TCAGAGTAGAACAGAG | 51 | 6547 | 6562 | 552 |
| 848859 | N/A | N/A | GAGGGAGGTGCCAAGC | 31 | 6954 | 6969 | 553 |
| 848875 | N/A | N/A | CTACAAATGCAGGCAG | 63 | 7257 | 7272 | 554 |
| 848891 | N/A | N/A | AACTACGGGCCACACT | 7 | 7591 | 7606 | 555 |
| 848907 | N/A | N/A | ACGGATCCTGGCCCCA | 45 | 7834 | 7849 | 556 |
| 848269 | 663 | 678 | CCCGGCGGGCAGCCTG | 18 | 7936 | 7951 | 557 |
| 848280 | 680 | 695 | GATCTTGGTGAGGTAT | 1 | 7953 | 7968 | 558 |
| 848295 | 699 | 714 | GGCCATGGAAGACATG | 18 | 7972 | 7987 | 559 |
| 848923 | N/A | N/A | CTAGAGTCATGCTTTT | 0 | 8425 | 8440 | 560 |
| 848939 | N/A | N/A | GTGGAGAATCAGTGTG | 40 | 8683 | 8698 | 561 |
| 848955 | N/A | N/A | TTGAAGTCCAGCTCTC | 16 | 9258 | 9273 | 562 |
| 848971 | N/A | N/A | GCAATTCGGTTTGTCC | 65 | 10140 | 10155 | 563 |
| 848310 | 795 | 810 | AGACAGAGGAGTCCTC | 31 | 10556 | 10571 | 564 |
| 848987 | N/A | N/A | GATCATTTAAGGCAAG | 26 | 10850 | 10865 | 565 |
| 849003 | N/A | N/A | TCCCAAGATCCCACGA | 5 | 11460 | 11475 | 566 |
| 849019 | N/A | N/A | CAAGAGAAGCTTCTCC | 20 | 12152 | 12167 | 567 |
| 849035 | N/A | N/A | CTACAGCAATAACTGA | 46 | 12828 | 12843 | 568 |
| 849044 | N/A | N/A | GGATACACAGGCTCGC | 78 | 13108 | 13123 | 337 |
| 849051 | N/A | N/A | GAGCAGGGAGCTCATT | 0 | 13395 | 13410 | 569 |
| 849067 | N/A | N/A | CTAGAAGACAGCACAG | 15 | 14085 | 14100 | 570 |
| 849083 | N/A | N/A | CCGACCTGAAGACATC | 41 | 14380 | 14395 | 571 |
| 849099 | N/A | N/A | GCCCACCGCATAATCC | 18 | 14897 | 14912 | 572 |
| 849115 | N/A | N/A | GACAAAGGTTAGGGTA | 46 | 15549 | 15564 | 573 |
| 849131 | N/A | N/A | TGAATATCAATATCTA | 30 | 15984 | 15999 | 574 |
| 848326 | 939 | 954 | CCTCGATTTCCCGGTG | 30 | 16331 | 16346 | 575 |
| 848341 | 992 | 1007 | GCGGGTCCCGTCCTCC | 0 | 16384 | 16399 | 576 |
| 849147 | N/A | N/A | GACCACATGAGAAAGA | 0 | 16616 | 16631 | 577 |
| 848355 | 1029 | 1044 | TGCCATGACTGTCACA | 35 | 16659 | 16674 | 578 |
| 468460 | 1075 | 1090 | TTGGCCACGCCGGCAT | 19 | 16705 | 16720 | 48 |
| 848370 | 1076 | 1091 | CTTGGCCACGCCGGCA | 0 | 16706 | 16721 | 579 |
| 848386 | 1133 | 1148 | GCTAACCGTGCCCTTC | 20 | 16763 | 16778 | 580 |
| 849163 | N/A | N/A | CAGTAAGGGAGAGAAC | 3 | 17363 | 17378 | 581 |
| 849179 | N/A | N/A | CCCGTGCCAGGTCATG | 38 | 17958 | 17973 | 582 |
| 849195 | N/A | N/A | AGCTGCTAGTTATTTA | 44 | 18396 | 18411 | 583 |
| 849211 | N/A | N/A | GAAACAGGGACAGTTG | 25 | 19189 | 19204 | 584 |
| 849227 | N/A | N/A | GGAAGATATTAGCAAT | 78 | 19508 | 19523 | 585 |
| 849243 | N/A | N/A | CTTACAGGCACAGAGT | 27 | 19915 | 19930 | 586 |
| 848402 | 1238 | 1253 | GAGGACGCGGCTGTAC | 25 | 20069 | 20084 | 587 |
| 849259 | N/A | N/A | GTGGAACAAGATTCCT | 40 | 20818 | 20833 | 588 |
| 849275 | N/A | N/A | AGGCAGAACTCTGGCA | 56 | 21164 | 21179 | 589 |
| 848418 | 1414 | 1429 | CCAAAGTTGGTCCCCA | 0 | 21386 | 21401 | 590 |
| 848434 | 1546 | 1561 | AGCATCATGGCTGCAA | 49 | 22039 | 22054 | 591 |
| 848450 | 1641 | 1656 | CCTCAGGGAACCAGGC | 28 | 22134 | 22149 | 592 |
| 849291 | N/A | N/A | TGCCATCCTGCTTACC | 30 | 22209 | 22224 | 593 |
| 848466 | 1738 | 1753 | TGTGCTGACCATACAG | 20 | 22520 | 22535 | 594 |
| 849307 | N/A | N/A | CACCAAAATGCTGCAA | 39 | 23094 | 23109 | 595 |
| 849323 | N/A | N/A | GGCCTTAGAGTCAAAG | 0 | 23473 | 23488 | 596 |
| 468479 | 1926 | 1941 | AGCACCTGGCAATGGC | 47 | 23546 | 23561 | 597 |
| 848496 | 1997 | 2012 | GACACGGGTCCCCATG | 28 | 23617 | 23632 | 598 |
| 849339 | N/A | N/A | ACTAAGCTAAGTGCTT | 7 | 24113 | 24128 | 599 |
| 849355 | N/A | N/A | GCAAAATGGTGCTCTT | 52 | 24690 | 24705 | 600 |
| 849371 | N/A | N/A | ACCTAGAAACAACTCA | 23 | 25251 | 25266 | 601 |
| 848512 | 2084 | 2099 | CAGCACAGGCGGCTTG | 14 | 25415 | 25430 | 602 |
| 849387 | N/A | N/A | ATGCATATTGCATTTC | 44 | 25828 | 25843 | 603 |
| 849403 | N/A | N/A | GGCCAGACCACACTCC | 13 | 26808 | 26823 | 604 |
| 848528 | 2375 | 2390 | GGCAACGGCTGTCACG | 52 | 27518 | 27533 | 605 |
| 848544 | 2509 | 2524 | TGAGAGAGGGACAAGT | 27 | 27652 | 27667 | 606 |
| 848560 | 2613 | 2628 | AGTGAGTGAGTTCCAG | 65 | 27756 | 27771 | 607 |
| 848576 | 2713 | 2728 | TGGCAGCACCCGAGCA | 56 | 27856 | 27871 | 608 |
| 848591 | 2761 | 2776 | CTCAATAAAAGTCATT | 45 | 27904 | 27919 | 609 |
| 848607 | 2791 | 2806 | GAGGATTGAATGCCTG | 37 | 27934 | 27949 | 610 |
| 848623 | 2921 | 2936 | CTCCACAGTTAGCTGG | 35 | 28064 | 28079 | 611 |
| 848638 | 3045 | 3060 | GTAAAGGTGGCTCAGG | 46 | 28188 | 28203 | 612 |
| 848653 | 3123 | 3138 | ACTGCCGAGTCAGTCC | 29 | 28266 | 28281 | 613 |
| 848669 | 3180 | 3195 | GTGTACCCTGCCGGGT | 3 | 28323 | 28338 | 614 |
| 848684 | 3227 | 3242 | CCCCCTCTGGTTCCAG | 54 | 28370 | 28385 | 615 |
| 848700 | 3263 | 3278 | TGGCTCAGTTCCTGCT | 36 | 28406 | 28421 | 616 |
| 848716 | 3321 | 3336 | GCCCAGCCGGGTGAAG | 26 | 28464 | 28479 | 617 |
| 848732 | 3388 | 3403 | ATCACTCACCGAGCTT | 69 | 28531 | 28546 | 618 |
| 848748 | 3473 | 3488 | TGCCTTAGAAGCATCT | 68 | 28616 | 28631 | 619 |
| 848763 | 3578 | 3593 | CTGTAAAAAGGCAACA | 52 | 28721 | 28736 | 620 |

TABLE 9
Inhibition of PCSK9 mRNA by 3-10-3 gapmers targeting SEQ ID NO: 1 and 2

| | SEQ | SEQ | | | SEQ | SEQ | |
|---|---|---|---|---|---|---|---|
| | ID: 1 | ID: 1 | | | ID: 2 | ID 2: | |
| | Start | Stop | | % | Start | Stop | SEQ |
| ISIS No | Site | Site | Sequence | inhibition | Site | Site | ID NO |
| 848207 | 12 | 27 | GATCACGCCACCAGAG | 0 | 3487 | 3502 | 621 |
| 848223 | 209 | 224 | CGCGGAATCCTGGCTG | 1 | 3684 | 3699 | 622 |
| 848239 | 477 | 492 | CTAGCACCAGCTCCTC | 38 | 3952 | 3967 | 623 |
| 848255 | 533 | 548 | GGCTGTGGTTCCGTGC | 29 | 4008 | 4023 | 624 |
| 848780 | N/A | N/A | AAACAGCACCGCACCG | 0 | 4090 | 4105 | 625 |
| 848796 | N/A | N/A | CCGCACACGGTCGGCA | 35 | 4821 | 4836 | 626 |
| 848812 | N/A | N/A | GAACAAGGAAGAGGGC | 39 | 5341 | 5356 | 627 |
| 848828 | N/A | N/A | CAAAGACCCATCTGAA | 32 | 5803 | 5818 | 628 |
| 848844 | N/A | N/A | TCATGAATCAAGTCCA | 71 | 6650 | 6665 | 629 |
| 848860 | N/A | N/A | GCAGAGATCAATCACA | 36 | 6997 | 7012 | 630 |
| 848876 | N/A | N/A | TCCCATCCAGATGCTC | 34 | 7272 | 7287 | 631 |
| 848892 | N/A | N/A | ATTCAGGCAAAAATGG | 12 | 7608 | 7623 | 632 |
| 848270 | 665 | 680 | TCCCCGGCGGGCAGCC | 24 | 7938 | 7953 | 633 |
| 848281 | 681 | 696 | GGATCTTGGTGAGGTA | 23 | 7954 | 7969 | 634 |
| 848296 | 704 | 719 | AAGAAGGCCATGGAAG | 38 | 7977 | 7992 | 635 |
| 848908 | N/A | N/A | TGCCATTCCCAAAAAG | 0 | 8045 | 8060 | 636 |
| 848924 | N/A | N/A | CAAAGGAATTTTGGAC | 0 | 8442 | 8457 | 637 |
| 848940 | N/A | N/A | TGCCATGTGGAGAATC | 24 | 8689 | 8704 | 638 |
| 848956 | N/A | N/A | TCGAACCCAGGCTGGT | 0 | 9286 | 9301 | 639 |
| 848972 | N/A | N/A | CATGACATAACAGCAC | 24 | 10158 | 10173 | 640 |
| 848311 | 797 | 812 | AAAGACAGAGGAGTCC | 28 | 10558 | 10573 | 641 |
| 848988 | N/A | N/A | AAAGAGGATCATTTAA | 0 | 10856 | 10871 | 642 |
| 849004 | N/A | N/A | CAAGAACGACAAAGCT | 48 | 11493 | 11508 | 643 |
| 849020 | N/A | N/A | GGACACGGAAGAGGCA | 63 | 12166 | 12181 | 644 |
| 849036 | N/A | N/A | ACAGAGAAATGCATGC | 66 | 12843 | 12858 | 645 |
| 849044 | N/A | N/A | GGATACACAGGCTCGC | 8 | 13108 | 13123 | 337 |
| 849052 | N/A | N/A | CTCTATCTTCCAAACC | 22 | 13578 | 13593 | 646 |
| 849068 | N/A | N/A | ATACAGGCTTATCTAG | 3 | 14097 | 14112 | 647 |
| 849084 | N/A | N/A | CAATAGGCATCTACCA | 59 | 14444 | 14459 | 648 |
| 849100 | N/A | N/A | AGGACTTACAGCCCAC | 12 | 14907 | 14922 | 649 |
| 849116 | N/A | N/A | GCCCATGCAGGACAAA | 11 | 15559 | 15574 | 650 |
| 849132 | N/A | N/A | TATGAATATCAATATC | 0 | 15986 | 16001 | 651 |
| 468453 | 950 | 965 | CATGACCCTGCCCTCG | 45 | 16342 | 16357 | 652 |
| 848342 | 995 | 1010 | GAAGCGGGTCCCGTCC | 17 | 16387 | 16402 | 653 |
| 849148 | N/A | N/A | ACACAAGGACCACATG | 0 | 16623 | 16638 | 654 |
| 848356 | 1040 | 1055 | TGCCAGGTGGGTGCCA | 26 | 16670 | 16685 | 655 |
| 468460 | 1075 | 1090 | TTGGCCACGCCGGCAT | 0 | 16705 | 16720 | 48 |
| 848371 | 1077 | 1092 | CCTTGGCCACGCCGGC | 37 | 16707 | 16722 | 656 |
| 848387 | 1135 | 1150 | CCGCTAACCGTGCCCT | 17 | 16765 | 16780 | 657 |
| 849164 | N/A | N/A | CTTGAGCTGTGCGACC | 27 | 17497 | 17512 | 658 |
| 849180 | N/A | N/A | CCCCGTGCCAGGTCAT | 26 | 17959 | 17974 | 659 |
| 849196 | N/A | N/A | ACAACAGCCACATTTA | 56 | 18413 | 18428 | 660 |
| 849212 | N/A | N/A | TGTGAAACAGGGACAG | 17 | 19192 | 19207 | 661 |
| 849228 | N/A | N/A | TAATATATACATCCTA | 0 | 19564 | 19579 | 662 |
| 849244 | N/A | N/A | CCTTACAGGCACAGAG | 16 | 19916 | 19931 | 663 |
| 848403 | 1241 | 1256 | GTTGAGGACGCGGCTG | 19 | 20072 | 20087 | 664 |
| 849260 | N/A | N/A | CCAACGCGCGCGCGCG | 4 | 20870 | 20885 | 665 |
| 849276 | N/A | N/A | GAAAATCTGACTGCCC | 43 | 21180 | 21195 | 666 |
| 848419 | 1416 | 1431 | GGCCAAAGTTGGTCCC | 0 | 21388 | 21403 | 667 |
| 848435 | 1550 | 1565 | AGACAGCATCATGGCT | 43 | 22043 | 22058 | 668 |
| 848451 | 1656 | 1671 | TCAGTACCCGCTGGTC | 41 | 22149 | 22164 | 669 |
| 849292 | N/A | N/A | GGTCACACAGACCTCC | 24 | 22252 | 22267 | 670 |
| 848467 | 1744 | 1759 | CCCGAGTGTGCTGACC | 39 | 22526 | 22541 | 671 |
| 849308 | N/A | N/A | TTCCACCAAAATGCTG | 7 | 23097 | 23112 | 672 |
| 848482 | 1927 | 1942 | CAGCACCTGGCAATGG | 10 | 23547 | 23562 | 673 |
| 848497 | 1998 | 2013 | GGACACGGGTCCCCAT | 32 | 23618 | 23633 | 674 |
| 849324 | N/A | N/A | GGCAAGCCCAGCCTCC | 0 | 23667 | 23682 | 675 |
| 849340 | N/A | N/A | AACGATAGCTAGAATT | 12 | 24143 | 24158 | 676 |
| 849356 | N/A | N/A | TGGTAGGGTTGTGGTT | 0 | 24782 | 24797 | 677 |
| 849372 | N/A | N/A | GCAAGAGCTAGGAAAC | 60 | 25265 | 25280 | 678 |
| 848513 | 2086 | 2101 | CTCAGCACAGGCGGCT | 41 | 25417 | 25432 | 679 |
| 849388 | N/A | N/A | ATGCATGCATATTGCA | 0 | 25832 | 25847 | 680 |
| 849404 | N/A | N/A | CTTCAGACTCCAGCCT | 0 | 26944 | 26959 | 681 |
| 848529 | 2378 | 2393 | GATGGCAACGGCTGTC | 0 | 27521 | 27536 | 682 |
| 848545 | 2511 | 2526 | GCTGAGAGAGGGACAA | 54 | 27654 | 27669 | 683 |
| 848561 | 2617 | 2632 | CCAGAGTGAGTGAGTT | 30 | 27760 | 27775 | 684 |
| 848577 | 2714 | 2729 | CTGGCAGCACCCGAGC | 52 | 27857 | 27872 | 685 |
| 848592 | 2762 | 2777 | GCTCAATAAAAGTCAT | 44 | 27905 | 27920 | 686 |
| 848608 | 2795 | 2810 | ACCTGAGGATTGAATG | 16 | 27938 | 27953 | 687 |
| 848624 | 2944 | 2959 | AATCAGGGAGCCCCCA | 0 | 28087 | 28102 | 688 |
| 848639 | 3047 | 3062 | GAGTAAAGGTGGCTCA | 19 | 28190 | 28205 | 689 |
| 848654 | 3124 | 3139 | CACTGCCGAGTCAGTC | 51 | 28267 | 28282 | 690 |
| 848670 | 3186 | 3201 | GCGAATGTGTACCCTG | 81 | 28329 | 28344 | 691 |
| 848685 | 3229 | 3244 | CGCCCCCTCTGGTTCC | 57 | 28372 | 28387 | 692 |
| 848701 | 3264 | 3279 | CTGGCTCAGTTCCTGC | 69 | 28407 | 28422 | 693 |
| 848717 | 3330 | 3345 | AAATGAGGAGCCCAGC | 42 | 28473 | 28488 | 694 |
| 848733 | 3392 | 3407 | TGCCATCACTCACCGA | 48 | 28535 | 28550 | 695 |
| 848749 | 3482 | 3497 | CCCCGACCATGCCTTA | 43 | 28625 | 28640 | 696 |
| 848764 | 3580 | 3595 | GGCTGTAAAAAGGCAA | 68 | 28723 | 28738 | 697 |

TABLE 10
Inhibition of PCSK9 mRNA by 3-10-3 cEt gapmers targeting SEQ ID NO: 1 and 2

| | SEQ | SEQ | | | SEQ | SEQ | |
|---|---|---|---|---|---|---|---|
| | ID: 1 | ID: 1 | | | ID: 2 | ID 2: | |
| | Start | Stop | | % | Start | Stop | SEQ |
| ISIS No | Site | Site | Sequence | inhibition | Site | Site | ID NO |
| 848208 | 15 | 30 | GCAGATCACGCCACCA | 0 | 3490 | 3505 | 698 |
| 848224 | 212 | 227 | GCGCGCGGAATCCTGG | 21 | 3687 | 3702 | 699 |
| 848240 | 478 | 493 | GCTAGCACCAGCTCCT | 37 | 3953 | 3968 | 700 |
| 468441 | 541 | 556 | TGGAAGGTGGCTGTGG | 0 | 4016 | 4031 | 701 |
| 848781 | N/A | N/A | CCGAGAGGAAACAGCA | 52 | 4098 | 4113 | 702 |
| 848797 | N/A | N/A | AGCAAACTCGCCCCGC | 55 | 4833 | 4848 | 703 |
| 848813 | N/A | N/A | GGCTCAGGGAACAAGG | 39 | 5349 | 5364 | 704 |
| 848829 | N/A | N/A | CACCATCATCGCTGAA | 39 | 5834 | 5849 | 705 |
| 848845 | N/A | N/A | GCAGACATACCTGCTT | 24 | 6693 | 6708 | 706 |
| 848861 | N/A | N/A | CTACATGTGCAGAGAT | 52 | 7005 | 7020 | 707 |
| 848877 | N/A | N/A | ATAAATCTCCCATCCA | 36 | 7279 | 7294 | 708 |
| 848893 | N/A | N/A | TTTCAAATGTGCCATT | 22 | 7621 | 7636 | 709 |
| 468443 | 666 | 681 | ATCCCCGGCGGGCAGC | 52 | 7939 | 7954 | 710 |
| 848282 | 682 | 697 | AGGATCTTGGTGAGGT | 47 | 7955 | 7970 | 711 |
| 848297 | 732 | 747 | CGCCACTCATCTTCAC | 23 | 8005 | 8020 | 712 |
| 848909 | N/A | N/A | GGCCTACTAAGCACAG | 49 | 8100 | 8115 | 713 |
| 848925 | N/A | N/A | TTCAAAGGAATTTTGG | 0 | 8444 | 8459 | 714 |
| 848941 | N/A | N/A | ACCCAGGTCCAGACTC | 44 | 8793 | 8808 | 715 |
| 848957 | N/A | N/A | GGTTAGACAGCCAATA | 48 | 9318 | 9333 | 716 |
| 848973 | N/A | N/A | CTAAATCATGACATAA | 14 | 10164 | 10179 | 717 |
| 848312 | 799 | 814 | GCAAAGACAGAGGAGT | 46 | 10560 | 10575 | 718 |
| 848989 | N/A | N/A | TCCAAGGTAAGTGCAG | 52 | 10924 | 10939 | 719 |
| 849005 | N/A | N/A | GACAAGAACGACAAAG | 46 | 11495 | 11510 | 720 |
| 849021 | N/A | N/A | GACAATGAAGAGGAGA | 69 | 12240 | 12255 | 721 |
| 849037 | N/A | N/A | CTCAATACCTGACAGA | 50 | 12854 | 12869 | 722 |
| 849044 | N/A | N/A | GGATACACAGGCTCGC | 8 | 13108 | 13123 | 337 |
| 849053 | N/A | N/A | TGGTAAAAGCCCCCAC | 39 | 13677 | 13692 | 723 |
| 849069 | N/A | N/A | ATACATTGGCAGACAG | 56 | 14121 | 14136 | 724 |
| 849085 | N/A | N/A | ACTCATCAATAGGCAT | 79 | 14450 | 14465 | 725 |
| 849101 | N/A | N/A | CATCACAGGACTTACA | 0 | 14913 | 14928 | 726 |
| 849117 | N/A | N/A | CAAGAGACTCACTGGG | 16 | 15581 | 15596 | 727 |
| 849133 | N/A | N/A | TGCCAAGAAGGACCCA | 61 | 16020 | 16035 | 728 |
| 848327 | 953 | 968 | GACCATGACCCTGCCC | 41 | 16345 | 16360 | 729 |
| 848343 | 997 | 1012 | TGGAAGCGGGTCCCGT | 11 | 16389 | 16404 | 730 |
| 849149 | N/A | N/A | TGCTCGACGAACACAA | 0 | 16633 | 16648 | 731 |
| 848357 | 1053 | 1068 | CGCTGACCACCCCTGC | 33 | 16683 | 16698 | 732 |
| 468460 | 1075 | 1090 | TTGGCCACGCCGGCAT | 7 | 16705 | 16720 | 48 |
| 848372 | 1078 | 1093 | CCCTTGGCCACGCCGG | 49 | 16708 | 16723 | 733 |
| 848388 | 1137 | 1152 | TGCCGCTAACCGTGCC | 10 | 16767 | 16782 | 734 |
| 849165 | N/A | N/A | GTGGAAGTCAAGCTGC | 42 | 17550 | 17565 | 735 |
| 849181 | N/A | N/A | GCCCCGTGCCAGGTCA | 58 | 17960 | 17975 | 736 |
| 849197 | N/A | N/A | TAGGAGACAGCTAGTG | 25 | 18486 | 18501 | 737 |
| 849213 | N/A | N/A | CACAAACTTGAACAGA | 38 | 19248 | 19263 | 738 |
| 849229 | N/A | N/A | CTTAATATATACATCC | 0 | 19566 | 19581 | 739 |
| 849245 | N/A | N/A | GCCAAGGTCACCCCTT | 0 | 19963 | 19978 | 740 |
| 848404 | 1283 | 1298 | GACCAGCACGACCCCA | 13 | 20114 | 20129 | 741 |
| 849261 | N/A | N/A | ACCTAGGTTACCGCTG | 33 | 20918 | 20933 | 742 |
| 849277 | N/A | N/A | AGGAAAATCTGACTGC | 26 | 21182 | 21197 | 743 |
| 848420 | 1423 | 1438 | ACACAGCGGCCAAAGT | 0 | 21395 | 21410 | 744 |
| 848436 | 1552 | 1567 | GCAGACAGCATCATGG | 76 | 22045 | 22060 | 745 |
| 848452 | 1658 | 1673 | GGTCAGTACCCGCTGG | 29 | 22151 | 22166 | 746 |
| 849293 | N/A | N/A | CCTATTTAAGGTGGCG | 5 | 22311 | 22326 | 747 |
| 848468 | 1753 | 1768 | CGTGTAGGCCCCGAGT | 44 | 22535 | 22550 | 748 |
| 849309 | N/A | N/A | CAGAAATGCCTGCCCC | 64 | 23141 | 23156 | 749 |
| 848483 | 1928 | 1943 | GCAGCACCTGGCAATG | 0 | 23548 | 23563 | 750 |
| 848498 | 1999 | 2014 | TGGACACGGGTCCCCA | 2 | 23619 | 23634 | 751 |
| 849325 | N/A | N/A | CCTCACCCCAGGGCAA | 0 | 23678 | 23693 | 752 |
| 849341 | N/A | N/A | GTAACGATAGCTAGAA | 52 | 24145 | 24160 | 753 |
| 849357 | N/A | N/A | TGAACATGGTAGGGTT | 62 | 24788 | 24803 | 754 |
| 849373 | N/A | N/A | AGGCAAGAGCTAGGAA | 51 | 25267 | 25282 | 755 |
| 848514 | 2113 | 2128 | ACGCACTGGTTGGGCT | 5 | 25444 | 25459 | 756 |
| 849389 | N/A | N/A | GTTAAATAGATCAGAG | 15 | 25989 | 26004 | 757 |
| 849405 | N/A | N/A | CCCCATAGCCTGCCCC | 0 | 27058 | 27073 | 758 |
| 848530 | 2381 | 2396 | GCAGATGGCAACGGCT | 14 | 27524 | 27539 | 759 |
| 848546 | 2520 | 2535 | CCATGGAGGGCTGAGA | 3 | 27663 | 27678 | 760 |
| 848562 | 2619 | 2634 | ACCCAGAGTGAGTGAG | 29 | 27762 | 27777 | 761 |
| 848578 | 2715 | 2730 | GCTGGCAGCACCCGAG | 18 | 27858 | 27873 | 762 |
| 848593 | 2763 | 2778 | AGCTCAATAAAAGTCA | 61 | 27906 | 27921 | 763 |
| 848609 | 2820 | 2835 | GAAGAATCCTGCCTCC | 42 | 27963 | 27978 | 764 |
| 848625 | 2946 | 2961 | TTAATCAGGGAGCCCC | 31 | 28089 | 28104 | 765 |
| 848640 | 3050 | 3065 | GCAGAGTAAAGGTGGC | 38 | 28193 | 28208 | 766 |
| 848655 | 3125 | 3140 | ACACTGCCGAGTCAGT | 32 | 28268 | 28283 | 767 |
| 848671 | 3188 | 3203 | GTGCGAATGTGTACCC | 68 | 28331 | 28346 | 768 |
| 848686 | 3237 | 3252 | GGCAGGCACGCCCCCT | 17 | 28380 | 28395 | 769 |
| 848702 | 3265 | 3280 | TCTGGCTCAGTTCCTG | 51 | 28408 | 28423 | 770 |
| 848718 | 3332 | 3347 | AAAAATGAGGAGCCCA | 17 | 28475 | 28490 | 771 |
| 848734 | 3415 | 3430 | TTCCATGCCTGCAGGC | 35 | 28558 | 28573 | 772 |
| 848750 | 3502 | 3517 | GGACAGTTGTTGGCCC | 25 | 28645 | 28660 | 773 |
| 848765 | 3588 | 3603 | GAAAAGTTGGCTGTAA | 22 | 28731 | 28746 | 774 |

TABLE 11
Inhibition of PCSK9 mRNA by 3-10-3 cEt gapmers targeting SEQ ID NO: 1 and 2

| | SEQ | SEQ | | | SEQ | SEQ | |
|---|---|---|---|---|---|---|---|
| | ID: 1 | ID: 1 | | | ID: 2 | ID 2: | |
| | Start | Stop | | % | Start | Stop | SEQ |
| ISIS No | Site | Site | Sequence | inhibition | Site | Site | ID NO |
| 848209 | 51 | 66 | ACCTTCTAGGGTGTGG | 0 | 3526 | 3541 | 775 |
| 848225 | 242 | 257 | CTGAAGTTCAGGAGCA | 35 | 3717 | 3732 | 776 |
| 848241 | 479 | 494 | GGCTAGCACCAGCTCC | 58 | 3954 | 3969 | 777 |
| 848256 | 549 | 564 | CGCAGCGGTGGAAGGT | 15 | 4024 | 4039 | 778 |
| 848782 | N/A | N/A | GCGAAGAGCCCTCGGC | 33 | 4158 | 4173 | 779 |
| 848798 | N/A | N/A | GGGAAGAAGCTTCCCA | 0 | 4882 | 4897 | 780 |
| 848814 | N/A | N/A | AGAAAGTCAAAGGCTC | 74 | 5360 | 5375 | 781 |
| 848830 | N/A | N/A | GACACCATCATCGCTG | 67 | 5836 | 5851 | 782 |
| 848846 | N/A | N/A | GGCAGACATACCTGCT | 0 | 6694 | 6709 | 783 |
| 848862 | N/A | N/A | GGCCTTAAGCTGCTTT | 10 | 7048 | 7063 | 784 |
| 848878 | N/A | N/A | ATATAAATCTCCCATC | 9 | 7281 | 7296 | 785 |
| 848894 | N/A | N/A | TCACATGGTTATATAA | 37 | 7640 | 7655 | 786 |
| 848271 | 667 | 682 | TATCCCCGGCGGGCAG | 35 | 7940 | 7955 | 787 |
| 848283 | 683 | 698 | CAGGATCTTGGTGAGG | 49 | 7956 | 7971 | 788 |
| 848298 | 740 | 755 | CAGCAGGTCGCCACTC | 5 | 8013 | 8028 | 789 |
| 848910 | N/A | N/A | AGCAATGGGCCTACTA | 0 | 8107 | 8122 | 790 |
| 848926 | N/A | N/A | AGCAACAGCTTCAAAG | 11 | 8453 | 8468 | 791 |
| 848942 | N/A | N/A | CTGATTAACCCATGGG | 46 | 8833 | 8848 | 792 |
| 848958 | N/A | N/A | TTACAGATAGAGGAAT | 0 | 9365 | 9380 | 793 |
| 848974 | N/A | N/A | GGACATGGAGTGAAGC | 7 | 10200 | 10215 | 794 |
| 848313 | 801 | 816 | GGGCAAAGACAGAGGA | 11 | 10562 | 10577 | 795 |
| 848990 | N/A | N/A | GGTAGAGTCACCATCA | 40 | 10953 | 10968 | 796 |
| 849006 | N/A | N/A | TCTCACAGCAACCTGT | 0 | 11548 | 11563 | 797 |
| 849022 | N/A | N/A | TCCTAACCCCCACAAC | 0 | 12373 | 12388 | 798 |
| 849038 | N/A | N/A | TGCAGGGCTAAAATCA | 34 | 12880 | 12895 | 799 |
| 849044 | N/A | N/A | GGATACACAGGCTCGC | 78 | 13108 | 13123 | 337 |
| 849054 | N/A | N/A | GGCAGGTGGGCCTGGT | 0 | 13689 | 13704 | 800 |
| 849070 | N/A | N/A | GGATACATTGGCAGAC | 41 | 14123 | 14138 | 801 |
| 849086 | N/A | N/A | GTGTTAGGAGCTTTCA | 60 | 14465 | 14480 | 802 |
| 849102 | N/A | N/A | AGACACATCACAGGAC | 27 | 14918 | 14933 | 803 |
| 849118 | N/A | N/A | AAGAAGCAGGCACTGG | 32 | 15608 | 15623 | 804 |
| 849134 | N/A | N/A | AAGGAAAGGGAGGCCT | 0 | 16081 | 16096 | 805 |
| 848328 | 964 | 979 | TCGAAGTCGGTGACCA | 17 | 16356 | 16371 | 806 |
| 848344 | 999 | 1014 | TGTGGAAGCGGGTCCC | 24 | 16391 | 16406 | 807 |
| 848358 | 1055 | 1070 | GCCGCTGACCACCCCT | 0 | 16685 | 16700 | 808 |
| 468460 | 1075 | 1090 | TTGGCCACGCCGGCAT | 30 | 16705 | 16720 | 48 |
| 848373 | 1079 | 1094 | ACCCTTGGCCACGCCG | 30 | 16709 | 16724 | 809 |
| 848389 | 1145 | 1160 | TATGAGGGTGCCGCTA | 4 | 16775 | 16790 | 810 |
| 849150 | N/A | N/A | ACTTACCTATGAGGGT | 0 | 16782 | 16797 | 811 |
| 849166 | N/A | N/A | GGCTTACAGTGGAAGT | 8 | 17558 | 17573 | 812 |
| 849182 | N/A | N/A | TGCCCCGTGCCAGGTC | 41 | 17961 | 17976 | 813 |
| 849198 | N/A | N/A | CCAGGAGCCGTGGCCA | 12 | 18537 | 18552 | 814 |
| 849214 | N/A | N/A | ACACAAACTTGAACAG | 10 | 19249 | 19264 | 815 |
| 849230 | N/A | N/A | TCTTAATATATACATC | 0 | 19567 | 19582 | 816 |
| 849246 | N/A | N/A | GAACAAAGCCAAGGTC | 0 | 19970 | 19985 | 817 |
| 848405 | 1286 | 1301 | GGTGACCAGCACGACC | 0 | 20117 | 20132 | 818 |
| 849262 | N/A | N/A | CCTTGATAGGCCAGGG | 0 | 20937 | 20952 | 819 |
| 849278 | N/A | N/A | TCCCACTCAAATGTCC | 0 | 21205 | 21220 | 820 |
| 848421 | 1425 | 1440 | CCACACAGCGGCCAAA | 0 | 21397 | 21412 | 821 |
| 848437 | 1554 | 1569 | CGGCAGACAGCATCAT | 72 | 22047 | 22062 | 822 |
| 848453 | 1681 | 1696 | GGCAGGGCGGCCACCA | 0 | 22174 | 22189 | 823 |
| 849294 | N/A | N/A | AAAATATTGCACAGCC | 0 | 22353 | 22368 | 824 |
| 848469 | 1760 | 1775 | GGCCATCCGTGTAGGC | 0 | 22542 | 22557 | 825 |
| 849310 | N/A | N/A | AGCATTAAGACCCCAT | 21 | 23167 | 23182 | 826 |
| 848484 | 1929 | 1944 | GGCAGCACCTGGCAAT | 17 | 23549 | 23564 | 827 |
| 848499 | 2000 | 2015 | GTGGACACGGGTCCCC | 17 | 23620 | 23635 | 828 |
| 849326 | N/A | N/A | AGAAAGAGACCCCTCC | 0 | 23692 | 23707 | 829 |
| 849342 | N/A | N/A | AAACAATAGTAACGAT | 0 | 24153 | 24168 | 830 |
| 849358 | N/A | N/A | TCTGAACATGGTAGGG | 58 | 24790 | 24805 | 831 |
| 849374 | N/A | N/A | GCCCATCCCCATCAGA | 6 | 25303 | 25318 | 832 |
| 848515 | 2157 | 2172 | GGGCATGGCAGCAGGA | 17 | 25488 | 25503 | 833 |
| 849390 | N/A | N/A | CTTCAGCATGCAGCTC | 6 | 26093 | 26108 | 834 |
| 849406 | N/A | N/A | TGAAACTGATGGCCCC | 22 | 27070 | 27085 | 835 |
| 848531 | 2383 | 2398 | CAGCAGATGGCAACGG | 25 | 27526 | 27541 | 836 |
| 848547 | 2522 | 2537 | GGCCATGGAGGGCTGA | 0 | 27665 | 27680 | 837 |
| 848563 | 2623 | 2638 | AGGCACCCAGAGTGAG | 12 | 27766 | 27781 | 838 |
| 848579 | 2716 | 2731 | AGCTGGCAGCACCCGA | 20 | 27859 | 27874 | 839 |
| 848594 | 2770 | 2785 | GAACAAGAGCTCAATA | 13 | 27913 | 27928 | 840 |
| 848610 | 2822 | 2837 | GGGAAGAATCCTGCCT | 25 | 27965 | 27980 | 841 |
| 848626 | 2948 | 2963 | CATTAATCAGGGAGCC | 21 | 28091 | 28106 | 842 |
| 848641 | 3052 | 3067 | GAGCAGAGTAAAGGTG | 23 | 28195 | 28210 | 843 |
| 848656 | 3126 | 3141 | CACACTGCCGAGTCAG | 56 | 28269 | 28284 | 844 |
| 848672 | 3213 | 3228 | AGGTTTCTTCCTCTGT | 60 | 28356 | 28371 | 845 |
| 848687 | 3243 | 3258 | GAGCTTGGCAGGCACG | 67 | 28386 | 28401 | 846 |
| 848703 | 3266 | 3281 | TTCTGGCTCAGTTCCT | 20 | 28409 | 28424 | 847 |
| 848719 | 3334 | 3349 | GTAAAAATGAGGAGCC | 29 | 28477 | 28492 | 848 |
| 848735 | 3421 | 3436 | AAAAAGTTCCATGCCT | 9 | 28564 | 28579 | 849 |
| 848751 | 3506 | 3521 | GGAGGGACAGTTGTTG | 0 | 28649 | 28664 | 850 |
| 848766 | 3590 | 3605 | TAGAAAAGTTGGCTGT | 22 | 28733 | 28748 | 851 |

TABLE 12
Inhibition of PCSK9 mRNA by 3-10-3 cEt gapmers targeting SEQ ID NO: 1 and 2

| | SEQ | SEQ | | | SEQ | SEQ | |
|---|---|---|---|---|---|---|---|
| | ID: 1 | ID: 1 | | | ID: 2 | ID 2: | |
| | Start | Stop | | % | Start | Stop | SEQ |
| ISIS No | Site | Site | Sequence | inhibition | Site | Site | ID NO |
| 848345 | 1012 | 1027 | TTGCTGGCCTGTCTGT | 3 | N/A | N/A | 852 |
| 848390 | 1148 | 1163 | GCCTATGAGGGTGCCG | 0 | N/A | N/A | 853 |
| 848454 | 1708 | 1723 | TGCCAACCTGCCCCAT | 8 | N/A | N/A | 854 |
| 848210 | 56 | 71 | CGGAAACCTTCTAGGG | 0 | 3531 | 3546 | 855 |
| 848226 | 244 | 259 | AGCTGAAGTTCAGGAG | 50 | 3719 | 3734 | 856 |
| 848242 | 480 | 495 | AGGCTAGCACCAGCTC | 37 | 3955 | 3970 | 857 |
| 848257 | 552 | 567 | TGGCGCAGCGGTGGAA | 0 | 4027 | 4042 | 858 |
| 848783 | N/A | N/A | CCACTACCCGTCCTCC | 0 | 4211 | 4226 | 859 |
| 848799 | N/A | N/A | CGGGAAGAAGCTTCCC | 0 | 4883 | 4898 | 860 |
| 848815 | N/A | N/A | CCCCACAACATCCCTC | 5 | 5377 | 5392 | 861 |
| 848831 | N/A | N/A | AAAGAACTGTGGACAT | 43 | 5935 | 5950 | 862 |
| 848847 | N/A | N/A | AGGCAGACATACCTGC | 0 | 6695 | 6710 | 863 |
| 848863 | N/A | N/A | CTGCAAGCTCTCCAGG | 17 | 7095 | 7110 | 864 |
| 848879 | N/A | N/A | CAAGAGTGACGGTTAT | 45 | 7295 | 7310 | 865 |
| 848895 | N/A | N/A | TATTATTCACATGGTT | 41 | 7646 | 7661 | 866 |
| 848272 | 668 | 683 | GTATCCCCGGCGGGCA | 37 | 7941 | 7956 | 867 |
| 848284 | 684 | 699 | GCAGGATCTTGGTGAG | 0 | 7957 | 7972 | 868 |
| 848299 | 743 | 758 | CTCCAGCAGGTCGCCA | 20 | 8016 | 8031 | 869 |
| 848911 | N/A | N/A | ATACATACTTGCTGTC | 21 | 8137 | 8152 | 870 |
| 848927 | N/A | N/A | TGGATAGCAACAGCTT | 70 | 8458 | 8473 | 871 |
| 848943 | N/A | N/A | TGCTGAGCTGATTAAC | 27 | 8840 | 8855 | 872 |
| 848959 | N/A | N/A | AATTATTATAACTGGT | 0 | 9381 | 9396 | 873 |
| 848975 | N/A | N/A | GGGCAGGATGGACATG | 4 | 10209 | 10224 | 874 |
| 848314 | 817 | 832 | TTCCACGGGATGCTCT | 3 | 10578 | 10593 | 875 |
| 848991 | N/A | N/A | TTAAAGGATCTGGTCC | 3 | 11011 | 11026 | 876 |
| 849007 | N/A | N/A | GTGTATGCAAAGTCAC | 55 | 11624 | 11639 | 877 |
| 849023 | N/A | N/A | AGGGAACAGTGGCTGC | 42 | 12407 | 12422 | 878 |
| 849039 | N/A | N/A | TTATTGAATGGTAAGA | 37 | 12905 | 12920 | 879 |
| 849044 | N/A | N/A | GGATACACAGGCTCGC | 77 | 13108 | 13123 | 337 |
| 849055 | N/A | N/A | CTGCAAGCATGGCCAG | 33 | 13710 | 13725 | 880 |
| 849071 | N/A | N/A | ACAACTGGATACATTG | 57 | 14129 | 14144 | 881 |
| 849087 | N/A | N/A | CACTTTGGTTTCTTCT | 28 | 14560 | 14575 | 882 |
| 849103 | N/A | N/A | CTTATGGCTTCGGTCA | 42 | 15107 | 15122 | 883 |
| 849119 | N/A | N/A | AGATACCAGGAGGGCT | 48 | 15730 | 15745 | 884 |
| 849135 | N/A | N/A | ATAGACAAGGAAAGGG | 68 | 16087 | 16102 | 885 |
| 848329 | 971 | 986 | CACATTCTCGAAGTCG | 25 | 16363 | 16378 | 886 |
| 848359 | 1056 | 1071 | GGCCGCTGACCACCCC | 19 | 16686 | 16701 | 887 |
| 468460 | 1075 | 1090 | TTGGCCACGCCGGCAT | 10 | 16705 | 16720 | 48 |
| 848374 | 1080 | 1095 | CACCCTTGGCCACGCC | 37 | 16710 | 16725 | 888 |
| 849151 | N/A | N/A | ATGGAGAGAGACCAGC | 20 | 16811 | 16826 | 889 |
| 849167 | N/A | N/A | CACCAGAGCCAGTGTT | 0 | 17590 | 17605 | 890 |
| 849183 | N/A | N/A | CTGCCCCGTGCCAGGT | 0 | 17962 | 17977 | 891 |
| 849199 | N/A | N/A | TGTCAAATGAGGTGTG | 15 | 18586 | 18601 | 892 |
| 849215 | N/A | N/A | ATGAGAAGGGCACACT | 0 | 19342 | 19357 | 893 |
| 849231 | N/A | N/A | AACTCTTAATATATAC | 0 | 19570 | 19585 | 894 |
| 849247 | N/A | N/A | AGGAACAAAGCCAAGG | 3 | 19972 | 19987 | 895 |
| 848406 | 1293 | 1308 | CGGCAGCGGTGACCAG | 0 | 20124 | 20139 | 896 |
| 849263 | N/A | N/A | GCCTTGATAGGCCAGG | 33 | 20938 | 20953 | 897 |
| 849279 | N/A | N/A | AGAGAAAGGAGCCCAA | 0 | 21290 | 21305 | 898 |
| 848422 | 1427 | 1442 | GTCCACACAGCGGCCA | 5 | 21399 | 21414 | 899 |
| 848438 | 1558 | 1573 | GGCTCGGCAGACAGCA | 58 | 22051 | 22066 | 900 |
| 849295 | N/A | N/A | GGCTTAAAGAACATAC | 28 | 22397 | 22412 | 901 |
| 848470 | 1772 | 1787 | GGCGACGGCTGTGGCC | 0 | 22554 | 22569 | 902 |
| 849311 | N/A | N/A | GAGCATTAAGACCCCA | 32 | 23168 | 23183 | 903 |
| 468480 | 1930 | 1945 | AGGCAGCACCTGGCAA | 19 | 23550 | 23565 | 904 |
| 848500 | 2001 | 2016 | AGTGGACACGGGTCCC | 56 | 23621 | 23636 | 905 |
| 849327 | N/A | N/A | TCACACTTGTGAGGAC | 0 | 23737 | 23752 | 906 |
| 849343 | N/A | N/A | AAAGCAACGGGTGATG | 0 | 24170 | 24185 | 907 |
| 849359 | N/A | N/A | GTAAGATGGAAAGAGA | 55 | 24877 | 24892 | 908 |
| 849375 | N/A | N/A | CTGGGATGCTCCGTCT | 0 | 25324 | 25339 | 909 |
| 848516 | 2172 | 2187 | TGCATTCCAGACCTGG | 6 | 25503 | 25518 | 910 |
| 849391 | N/A | N/A | TGCTAACAACCTTCAG | 0 | 26103 | 26118 | 911 |
| 849407 | N/A | N/A | TACCATGCCAGTGCCA | 29 | 27098 | 27113 | 912 |
| 848532 | 2386 | 2401 | CGGCAGCAGATGGCAA | 27 | 27529 | 27544 | 913 |
| 848548 | 2527 | 2542 | TGCCAGGCCATGGAGG | 0 | 27670 | 27685 | 914 |
| 848564 | 2628 | 2643 | GGAGGAGGCACCCAGA | 20 | 27771 | 27786 | 915 |
| 468487 | 2720 | 2735 | GAGCAGCTGGCAGCAC | 42 | 27863 | 27878 | 916 |
| 848595 | 2771 | 2786 | GGAACAAGAGCTCAAT | 47 | 27914 | 27929 | 917 |
| 848611 | 2828 | 2843 | ATCCATGGGAAGAATC | 15 | 27971 | 27986 | 918 |
| 848627 | 2951 | 2966 | CTCCATTAATCAGGGA | 26 | 28094 | 28109 | 919 |
| 848642 | 3055 | 3070 | ATAGAGCAGAGTAAAG | 0 | 28198 | 28213 | 920 |
| 848657 | 3127 | 3142 | GCACACTGCCGAGTCA | 46 | 28270 | 28285 | 921 |
| 848673 | 3214 | 3229 | CAGGTTTCTTCCTCTG | 34 | 28357 | 28372 | 922 |
| 848688 | 3245 | 3260 | GTGAGCTTGGCAGGCA | 70 | 28388 | 28403 | 923 |
| 848704 | 3267 | 3282 | TTTCTGGCTCAGTTCC | 54 | 28410 | 28425 | 924 |
| 848720 | 3336 | 3351 | CCGTAAAAATGAGGAG | 17 | 28479 | 28494 | 925 |
| 848736 | 3423 | 3438 | GGAAAAAGTTCCATGC | 57 | 28566 | 28581 | 926 |
| 468502 | 3508 | 3523 | AAGGAGGGACAGTIGT | 0 | 28651 | 28666 | 927 |
| 848767 | 3592 | 3607 | TCTAGAAAAGTTGGCT | 39 | 28735 | 28750 | 928 |

TABLE 13
Inhibition of PCSK9 mRNA by 3-10-3 cEt gapmers targeting SEQ ID NO: 1 and 2

| | SEQ | SEQ | | | SEQ | SEQ | |
|---|---|---|---|---|---|---|---|
| | ID: 1 | ID: 1 | | | ID: 2 | ID 2: | |
| | Start | Stop | | % | Start | Stop | SEQ |
| ISIS No | Site | Site | Sequence | inhibition | Site | Site | ID NO |
| 848258 | 561 | 576 | ACGGATCCTTGGCGCA | 38 | N/A | N/A | 929 |
| 848300 | 753 | 768 | TCAAGGCCAGCTCCAG | 23 | N/A | N/A | 930 |
| 848346 | 1014 | 1029 | ACTTGCTGGCCTGTCT | 0 | N/A | N/A | 931 |
| 848391 | 1154 | 1169 | CTCCAGGCCTATGAGG | 0 | N/A | N/A | 932 |
| 848211 | 58 | 73 | TGCGGAAACCTTCTAG | 0 | 3533 | 3548 | 933 |
| 848227 | 258 | 273 | GAGGACTGTGCAGGAG | 42 | 3733 | 3748 | 934 |
| 848243 | 481 | 496 | AAGGCTAGCACCAGCT | 23 | 3956 | 3971 | 935 |
| 848784 | N/A | N/A | GGATATCCTGGCAGTG | 0 | 4350 | 4365 | 936 |
| 848800 | N/A | N/A | GAAAAAGCTAGTGGTC | 30 | 4905 | 4920 | 937 |
| 848816 | N/A | N/A | CTTGAAATGCCCTTTC | 0 | 5408 | 5423 | 938 |
| 848832 | N/A | N/A | TACATTTCAGACGGTG | 61 | 6279 | 6294 | 939 |
| 848848 | N/A | N/A | ATTATAGCAGCCACTA | 13 | 6761 | 6776 | 940 |
| 848864 | N/A | N/A | ATTTATTCAGCTCATG | 1 | 7114 | 7129 | 941 |
| 848880 | N/A | N/A | TGGGAAAGTCAAGAGT | 44 | 7304 | 7319 | 942 |
| 848896 | N/A | N/A | GCCAACTATTATTATT | 26 | 7655 | 7670 | 943 |
| 466846 | 669 | 684 | GGTATCCCCGGCGGGC | 45 | 7942 | 7957 | 944 |
| 848285 | 685 | 700 | TGCAGGATCTTGGTGA | 0 | 7958 | 7973 | 945 |
| 848912 | N/A | N/A | GATAAGTGCTCAATAC | 33 | 8149 | 8164 | 946 |
| 848928 | N/A | N/A | CTGGATAGCAACAGCT | 71 | 8459 | 8474 | 947 |
| 848944 | N/A | N/A | CGCCACAGGCCTTGGT | 30 | 8881 | 8896 | 948 |
| 848960 | N/A | N/A | CCAATTATTATAACTG | 21 | 9383 | 9398 | 949 |
| 848976 | N/A | N/A | AGCCAGGCTGTGCCAA | 0 | 10231 | 10246 | 950 |
| 848315 | 824 | 839 | CTCCAGGTTCCACGGG | 0 | 10585 | 10600 | 951 |
| 848992 | N/A | N/A | ATTAAAGGATCTGGTC | 2 | 11012 | 11027 | 952 |
| 849008 | N/A | N/A | CAGACATATGCAAGGT | 68 | 11652 | 11667 | 953 |
| 849024 | N/A | N/A | GCCCAAGGGAGAGGAG | 0 | 12421 | 12436 | 954 |
| 849040 | N/A | N/A | GTTATTATTGAATGGT | 80 | 12909 | 12924 | 955 |
| 849044 | N/A | N/A | GGATACACAGGCTCGC | 76 | 13108 | 13123 | 337 |
| 849056 | N/A | N/A | CAGGAGGCTGCAAGCA | 49 | 13717 | 13732 | 956 |
| 849072 | N/A | N/A | CAGGAAGCAGCCCAAG | 0 | 14175 | 14190 | 957 |
| 849088 | N/A | N/A | CTCCACTGATCAGTCC | 49 | 14582 | 14597 | 958 |
| 849104 | N/A | N/A | CCAAATATGCTGCAGA | 20 | 15185 | 15200 | 959 |
| 849120 | N/A | N/A | AGAGACAGGAAGCTGC | 63 | 15808 | 15823 | 960 |
| 849136 | N/A | N/A | CACAGAAACTACAGAG | 0 | 16199 | 16214 | 961 |
| 848330 | 974 | 989 | GGGCACATTCTCGAAG | 0 | 16366 | 16381 | 962 |
| 848360 | 1057 | 1072 | CGGCCGCTGACCACCC | 0 | 16687 | 16702 | 963 |
| 468460 | 1075 | 1090 | TTGGCCACGCCGGCAT | 0 | 16705 | 16720 | 48 |
| 848375 | 1081 | 1096 | GCACCCTTGGCCACGC | 24 | 16711 | 16726 | 964 |
| 849152 | N/A | N/A | CCAGATGGAGAGAGAC | 26 | 16815 | 16830 | 965 |
| 849168 | N/A | N/A | GGCTAGTGGGCTGCCT | 0 | 17613 | 17628 | 966 |
| 849184 | N/A | N/A | CCCTGCCCCGTGCCAG | 0 | 17964 | 17979 | 967 |
| 849200 | N/A | N/A | GCCTAACGCAGCTCTG | 62 | 18644 | 18659 | 968 |
| 849216 | N/A | N/A | GAGGAATGAGAAGGGC | 61 | 19347 | 19362 | 969 |
| 849232 | N/A | N/A | CCGCACGGTCACATGA | 19 | 19592 | 19607 | 970 |
| 849248 | N/A | N/A | GTGCCACAAGAAGCCC | 9 | 20268 | 20283 | 971 |
| | | | | | 20286 | 20301 | |
| 848407 | 1301 | 1316 | GAAGTTGCCGGCAGCG | 24 | 20132 | 20147 | 972 |
| 849264 | N/A | N/A | TAAATTCGGCCGCCAG | 9 | 20958 | 20973 | 973 |
| 848423 | 1433 | 1448 | AAAGAGGTCCACACAG | 0 | 21405 | 21420 | 974 |
| 849280 | N/A | N/A | CTGTTAGCATCACGGT | 25 | 21542 | 21557 | 975 |
| 848439 | 1574 | 1589 | GGCCAGGGTGAGCTCC | 0 | 22067 | 22082 | 976 |
| 849296 | N/A | N/A | GAGAGAGGAGGGCTTA | 0 | 22407 | 22422 | 977 |
| 848455 | 1716 | 1731 | AAAACAGCTGCCAACC | 0 | 22498 | 22513 | 978 |
| 848471 | 1774 | 1789 | CGGGCGACGGCTGTGG | 0 | 22556 | 22571 | 979 |
| 849312 | N/A | N/A | ACACGAGCATTAAGAC | 45 | 23172 | 23187 | 980 |
| 848485 | 1932 | 1947 | GCAGGCAGCACCTGGC | 7 | 23552 | 23567 | 981 |
| 848501 | 2002 | 2017 | CAGTGGACACGGGTCC | 37 | 23622 | 23637 | 982 |
| 849328 | N/A | N/A | CTGCAAGTCAGGCTTG | 20 | 23764 | 23779 | 983 |
| 849344 | N/A | N/A | TTTAAAGCAACGGGTG | 47 | 24173 | 24188 | 984 |
| 849360 | N/A | N/A | AGCTACACTGAGGCTC | 23 | 24906 | 24921 | 985 |
| 848517 | 2177 | 2192 | GACTTTGCATTCCAGA | 41 | 25508 | 25523 | 986 |
| 849376 | N/A | N/A | GGCAGAGGAAAGCCAG | 0 | 25355 | 25370 | 987 |
| 849392 | N/A | N/A | TGTCACATTCCAGGGC | 43 | 26171 | 26186 | 988 |
| 849408 | N/A | N/A | AGATAGACAGATGCCT | 8 | 27113 | 27128 | 989 |
| 848533 | 2402 | 2417 | CGCCAGGTGCCGGCTC | 0 | 27545 | 27560 | 990 |
| 848549 | 2550 | 2565 | GCGGAAGCATCCCCAT | 0 | 27693 | 27708 | 991 |
| 848565 | 2669 | 2684 | CCCCACAGTGAGGGAG | 20 | 27812 | 27827 | 992 |
| 848580 | 2727 | 2742 | ACATTGGGAGCAGCTG | 34 | 27870 | 27885 | 993 |
| 848596 | 2772 | 2787 | CGGAACAAGAGCTCAA | 70 | 27915 | 27930 | 994 |
| 848612 | 2832 | 2847 | CCCTATCCATGGGAAG | 39 | 27975 | 27990 | 995 |
| 848628 | 2959 | 2974 | AGCTAAGCCTCCATTA | 15 | 28102 | 28117 | 996 |
| 848643 | 3057 | 3072 | GCATAGAGCAGAGTAA | 0 | 28200 | 28215 | 997 |
| 848658 | 3128 | 3143 | TGCACACTGCCGAGTC | 49 | 28271 | 28286 | 998 |
| 848674 | 3215 | 3230 | CCAGGTTTCTTCCTCT | 58 | 28358 | 28373 | 999 |
| 848689 | 3246 | 3261 | TGTGAGCTTGGCAGGC | 39 | 28389 | 28404 | 1000 |
| 848705 | 3268 | 3283 | GTTTCTGGCTCAGTTC | 3 | 28411 | 28426 | 1001 |
| 848721 | 3338 | 3353 | ACCCGTAAAAATGAGG | 0 | 28481 | 28496 | 1002 |
| 848737 | 3425 | 3440 | ACGGAAAAAGTTCCAT | 18 | 28568 | 28583 | 1003 |
| 848752 | 3511 | 3526 | CTCAAGGAGGGACAGT | 33 | 28654 | 28669 | 1004 |
| 848768 | 3599 | 3614 | AAACAGGTCTAGAAAA | 17 | 28742 | 28757 | 1005 |

TABLE 14
Inhibition of PCSK9 mRNA by 3-10-3 cEt gapmers targeting SEQ ID NO: 1 and 2

| | SEQ | SEQ | | | SEQ | SEQ | |
|---|---|---|---|---|---|---|---|
| | ID: 1 | ID: 1 | | | ID: 2 | ID 2: | |
| | Start | Stop | | % | Start | Stop | SEQ |
| ISIS No | Site | Site | Sequence | inhibition | Site | Site | ID NO |
| 468456 | 1015 | 1030 | CACTTGCTGGCCTGTC | 22 | N/A | N/A | 1006 |
| 848259 | 565 | 580 | CTCCACGGATCCTTGG | 0 | N/A | N/A | 1007 |
| 848301 | 754 | 769 | TTCAAGGCCAGCTCCA | 42 | N/A | N/A | 1008 |
| 848392 | 1159 | 1174 | ATAAACTCCAGGCCTA | 37 | N/A | N/A | 1009 |
| 848212 | 64 | 79 | CGTCGCTGCGGAAACC | 41 | 3539 | 3554 | 1010 |
| 848228 | 293 | 308 | GTCCACGCCGGCGGCG | 32 | 3768 | 3783 | 1011 |
| 848244 | 482 | 497 | CAAGGCTAGCACCAGC | 45 | 3957 | 3972 | 1012 |
| 848785 | N/A | N/A | GAAATCTGGGCAGGAT | 39 | 4362 | 4377 | 1013 |
| 848801 | N/A | N/A | CACCACAGCTAGTGAG | 28 | 5003 | 5018 | 1014 |
| 848817 | N/A | N/A | CACTATTTCCAGAACA | 20 | 5445 | 5460 | 1015 |
| 848833 | N/A | N/A | AATAATCTCATGTCAG | 77 | 6356 | 6371 | 1016 |
| 848849 | N/A | N/A | CAAATTATAGCAGCCA | 85 | 6764 | 6779 | 1017 |
| 848865 | N/A | N/A | GATTTATTCAGCTCAT | 65 | 7115 | 7130 | 1018 |
| 848881 | N/A | N/A | CCACAGTACCTATGAC | 0 | 7330 | 7345 | 1019 |
| 848897 | N/A | N/A | CAAATGCGGACCAAAA | 38 | 7694 | 7709 | 1020 |
| 848273 | 670 | 685 | AGGTATCCCCGGCGGG | 26 | 7943 | 7958 | 1021 |
| 848286 | 686 | 701 | ATGCAGGATCTTGGTG | 0 | 7959 | 7974 | 1022 |
| 848913 | N/A | N/A | CGATAAGTGCTCAATA | 25 | 8150 | 8165 | 1023 |
| 848929 | N/A | N/A | AAAGAAGGGACTTCAC | 29 | 8476 | 8491 | 1024 |
| 848945 | N/A | N/A | ACTTAGACTACGGGTT | 25 | 8931 | 8946 | 1025 |
| 848961 | N/A | N/A | TCCTTAAATGAATGTT | 41 | 9399 | 9414 | 1026 |
| 848977 | N/A | N/A | CTTGATCAGGCTGGGA | 0 | 10332 | 10347 | 1027 |
| 848316 | 833 | 848 | GGTAATCCGCTCCAGG | 59 | 10594 | 10609 | 1028 |
| 848993 | N/A | N/A | TCCCATTAAAGGATCT | 23 | 11016 | 1103 | 1029 |
| 849009 | N/A | N/A | ACACATGACCGACCAG | 0 | 11773 | 11788 | 1030 |
| 849025 | N/A | N/A | CTCCAGCCAAGCCCTT | 40 | 12570 | 12585 | 1031 |
| 849041 | N/A | N/A | TCTGGATACACTGTTG | 27 | 13008 | 13023 | 1032 |
| 849044 | N/A | N/A | GGATACACAGGCTCGC | 85 | 13108 | 13123 | 337 |
| 849057 | N/A | N/A | GGTCAGGAGGCTGCAA | 61 | 13720 | 13735 | 1033 |
| 849073 | N/A | N/A | TGCTCAGGAAGCAGCC | 43 | 14179 | 14194 | 1034 |
| 849089 | N/A | N/A | CCCTAAGGCCTCCAGT | 41 | 14610 | 14625 | 1035 |
| 849105 | N/A | N/A | CTGAACAGCACCTCTG | 37 | 15220 | 15235 | 1036 |
| 849121 | N/A | N/A | TTAGAGACAGGAAGCT | 28 | 15810 | 15825 | 1037 |
| 849137 | N/A | N/A | CTTATAGTTAACACAC | 0 | 16212 | 16227 | 1038 |
| 848331 | 980 | 995 | CTCCTCGGGCACATTC | 7 | 16372 | 16387 | 1039 |
| 848361 | 1058 | 1073 | CCGGCCGCTGACCACC | 30 | 16688 | 16703 | 1040 |
| 468460 | 1075 | 1090 | TTGGCCACGCCGGCAT | 31 | 16705 | 16720 | 48 |
| 848376 | 1082 | 1097 | GGCACCCTTGGCCACG | 52 | 16712 | 16727 | 1041 |
| 849153 | N/A | N/A | GCCCAAGCCACCTCCC | 0 | 16840 | 16855 | 1042 |
| 849169 | N/A | N/A | AGGAAAGTCTCAGGGC | 78 | 17681 | 17696 | 1043 |
| 849185 | N/A | N/A | AGCCCCTGCCCCGTGC | 18 | 17967 | 17982 | 1044 |
| 849201 | N/A | N/A | GGCCTAACGCAGCTCT | 34 | 18645 | 18660 | 1045 |
| 849217 | N/A | N/A | AGGCACCAAGAGGATG | 20 | 19370 | 19385 | 1046 |
| 849233 | N/A | N/A | GCGGATTTCAGACTTG | 80 | 19613 | 19628 | 1047 |
| 848408 | 1304 | 1319 | CCGGAAGTTGCCGGCA | 3 | 20135 | 20150 | 1048 |
| 849249 | N/A | N/A | CGTGCCACAAGAAGCC | 2 | 20269 | 20284 | 1049 |
| | | | | | 20287 | 20302 | |
| 849265 | N/A | N/A | GCCTTTAAATTCGGCC | 0 | 20963 | 20978 | 1050 |
| 848424 | 1435 | 1450 | GCAAAGAGGTCCACAC | 0 | 21407 | 21422 | 1051 |
| 849281 | N/A | N/A | GGCACTGGAGGTCCCG | 31 | 21583 | 21598 | 1052 |
| 848440 | 1582 | 1597 | CTCAACTCGGCCAGGG | 43 | 22075 | 22090 | 1053 |
| 849297 | N/A | N/A | TAGGAGAGAGGAGGGC | 21 | 22410 | 22425 | 1054 |
| 848456 | 1718 | 1733 | GCAAAACAGCTGCCAA | 24 | 22500 | 22515 | 1055 |
| 848472 | 1778 | 1793 | GCAGCGGGCGACGGCT | 0 | 22560 | 22575 | 1056 |
| 849313 | N/A | N/A | CTCTCACACGAGCATT | 11 | 23177 | 23192 | 1057 |
| 848486 | 1933 | 1948 | AGCAGGCAGCACCTGG | 35 | 23553 | 23568 | 1058 |
| 848502 | 2003 | 2018 | GCAGTGGACACGGGTC | 43 | 23623 | 23638 | 1059 |
| 849329 | N/A | N/A | GTATGGAACTGCAAGT | 0 | 23772 | 23787 | 1060 |
| 849345 | N/A | N/A | ATTTTAAAGCAACGGG | 75 | 24175 | 24190 | 1061 |
| 849361 | N/A | N/A | AAACCTAAAATAGTGG | 4 | 24928 | 24943 | 1062 |
| 849377 | N/A | N/A | GGGCAGAGGAAAGCCA | 12 | 25356 | 25371 | 1063 |
| 848518 | 2190 | 2205 | TTCCATGCTCCTTGAC | 11 | 25521 | 25536 | 1064 |
| 849393 | N/A | N/A | ATACACTCAGGTTTCT | 45 | 26199 | 26214 | 1065 |
| 849409 | N/A | N/A | ACCCAGGCGGTTCTGC | 10 | 27185 | 27200 | 1066 |
| 848534 | 2427 | 2442 | GTCACTGGAGCTCCTG | 59 | 27570 | 27585 | 1067 |
| 848550 | 2554 | 2569 | AAAGGCGGAAGCATCC | 23 | 27697 | 27712 | 1068 |
| 848566 | 2677 | 2692 | GTGAAATGCCCCACAG | 34 | 27820 | 27835 | 1069 |
| 848581 | 2729 | 2744 | GCACATTGGGAGCAGC | 58 | 27872 | 27887 | 1070 |
| 848597 | 2773 | 2788 | ACGGAACAAGAGCTCA | 77 | 27916 | 27931 | 1071 |
| 848613 | 2869 | 2884 | CAACGATGTTTGTCCC | 67 | 28012 | 28027 | 1072 |
| 848629 | 2962 | 2977 | GAAAGCTAAGCCTCCA | 69 | 28105 | 28120 | 1073 |
| 848644 | 3059 | 3074 | TGGCATAGAGCAGAGT | 49 | 28202 | 28217 | 1074 |
| 848659 | 3129 | 3144 | CTGCACACTGCCGAGT | 48 | 28272 | 28287 | 1075 |
| 848675 | 3216 | 3231 | TCCAGGTTTCTTCCTC | 63 | 28359 | 28374 | 1076 |
| 848690 | 3247 | 3262 | GTGTGAGCTTGGCAGG | 78 | 28390 | 28405 | 1077 |
| 848706 | 3269 | 3284 | CGTTTCTGGCTCAGTT | 55 | 28412 | 28427 | 1078 |
| 848722 | 3342 | 3357 | TGTTACCCGTAAAAAT | 0 | 28485 | 28500 | 1079 |
| 848738 | 3427 | 3442 | TAACGGAAAAAGTTCC | 64 | 28570 | 28585 | 1080 |
| 848753 | 3513 | 3528 | TGCTCAAGGAGGGACA | 27 | 28656 | 28671 | 1081 |
| 848769 | 3601 | 3616 | CAAAACAGGTCTAGAA | 43 | 28744 | 28759 | 1082 |

TABLE 15
Inhibition of PCSK9 mRNA by 3-10-3 cEt gapmers targeting SEQ ID NO: 1 and 2

| | SEQ ID: 1 | SEQ ID: 1 | | % | SEQ ID: 2 | SEQ ID: 2 | SEQ |
|---|---|---|---|---|---|---|---|
| ISIS No | Start Site | Stop Site | Sequence | inhibition | Start Site | Stop Site | ID NO |
| 848302 | 755 | 770 | CTTCAAGGCCAGCTCC | 0 | N/A | N/A | 1083 |
| 848347 | 1016 | 1031 | ACACTTGCTGGCCTGT | 0 | N/A | N/A | 1084 |
| 848213 | 85 | 100 | CTGCAACCATGAGCGC | 4 | 3560 | 3575 | 1085 |
| 848229 | 309 | 324 | CTAGAGGCCGTGCGCG | 18 | 3784 | 3799 | 1086 |
| 848245 | 483 | 498 | GCAAGGCTAGCACCAG | 45 | 3958 | 3973 | 1087 |
| 848786 | N/A | N/A | GAAACTGGGAAATCTG | 0 | 4370 | 4385 | 1088 |
| 848802 | N/A | N/A | GTCAAGCACCACAGCT | 54 | 5009 | 5024 | 1089 |
| 848818 | N/A | N/A | CCTCAAGGGCTTGGTT | 0 | 5509 | 5524 | 1090 |
| 848834 | N/A | N/A | AATCTATGCAGCAAAA | 0 | 6407 | 6422 | 1091 |
| 848850 | N/A | N/A | AACAAATTATAGCAGC | 75 | 6766 | 6781 | 1092 |
| 848882 | N/A | N/A | GACCACAGTACCTATG | 30 | 7332 | 7347 | 1093 |
| 848898 | N/A | N/A | ACCAAATGCGGACCAA | 66 | 7696 | 7711 | 1094 |
| 848260 | 571 | 586 | GGCAACCTCCACGGAT | 53 | 7844 | 7859 | 1095 |
| 466847 | 671 | 686 | GAGGTATCCCCGGCGG | 73 | 7944 | 7959 | 1096 |
| 848287 | 687 | 702 | CATGCAGGATCTTGGT | 5 | 7960 | 7975 | 1097 |
| 848914 | N/A | N/A | TGCTTGGTACCCGATA | 39 | 8161 | 8176 | 1098 |
| 848930 | N/A | N/A | CCTAAAGAAGGGACTT | 18 | 8479 | 8494 | 1099 |
| 848946 | N/A | N/A | AGGCATTGACTTGTCA | 46 | 8956 | 8971 | 1100 |
| 848962 | N/A | N/A | TACCTAGCATCTGCTG | 0 | 9437 | 9452 | 1101 |
| 848978 | N/A | N/A | ACAGACTAGGAGCCTG | 0 | 10361 | 10376 | 1102 |
| 848317 | 852 | 867 | CCGCCCGGTACCGTGG | 0 | 10613 | 10628 | 1103 |
| 848994 | N/A | N/A | AGGCATCCCAGACAGG | 52 | 11042 | 11057 | 1104 |
| 849010 | N/A | N/A | GCACACATGACCGACC | 0 | 11775 | 11790 | 1105 |
| 849026 | N/A | N/A | CCCCATGCCAGCCCAA | 33 | 12604 | 12619 | 1106 |
| 849042 | N/A | N/A | ATTAATCTTCTGGATA | 13 | 13016 | 13031 | 1107 |
| 849044 | N/A | N/A | GGATACACAGGCTCGC | 82 | 13108 | 13123 | 337 |
| 849058 | N/A | N/A | GGACAGGGTCAGGAGG | 22 | 13726 | 13741 | 1108 |
| 849074 | N/A | N/A | GGATACAGGTGCTCAG | 55 | 14188 | 14203 | 1109 |
| 849090 | N/A | N/A | ACACACACTGTCTACC | 38 | 14629 | 14644 | 1110 |
| 849106 | N/A | N/A | CCTCAGGTGGAATCAG | 56 | 15306 | 15321 | 1111 |
| 849122 | N/A | N/A | GAATAACAGTGATGTC | 17 | 15852 | 15867 | 1112 |
| 849138 | N/A | N/A | ACCTTATAGTTAACAC | 4 | 16214 | 16229 | 1113 |
| 848332 | 982 | 997 | TCCTCCTCGGGCACAT | 21 | 16374 | 16389 | 1114 |
| 848362 | 1059 | 1074 | CCCGGCCGCTGACCAC | 0 | 16689 | 16704 | 1115 |
| 468460 | 1075 | 1090 | TTGGCCACGCCGGCAT | 0 | 16705 | 16720 | 48 |
| 848377 | 1083 | 1098 | TGGCACCCTTGGCCAC | 0 | 16713 | 16728 | 1116 |
| 849154 | N/A | N/A | GGTCAAGGCTGAACTC | 27 | 17014 | 17029 | 1117 |
| 849170 | N/A | N/A | TAGGAAAGTCTCAGGG | 36 | 17682 | 17697 | 1118 |
| 849186 | N/A | N/A | AGGCAATAGTGACTGT | 52 | 17985 | 18000 | 1119 |
| 849202 | N/A | N/A | CTGGAGACTGGAGGCC | 0 | 18657 | 18672 | 1120 |
| 849218 | N/A | N/A | GAAAGAGAGGCACCAA | 0 | 19377 | 19392 | 1121 |
| 849234 | N/A | N/A | TGCGGATTTCAGACTT | 24 | 19614 | 19629 | 1122 |
| 848393 | 1161 | 1176 | GAATAAACTCCAGGCC | 0 | 1999 | 20007 | 1123 |
| 848409 | 1322 | 1337 | GTAGAGGCAGGCATCG | 42 | 20153 | 20168 | 1124 |
| 849250 | N/A | N/A | CAGAAGGGTTCGGCCT | 32 | 20310 | 20325 | 1125 |
| 849266 | N/A | N/A | GGCTTTGTTTGCTTGA | 68 | 20980 | 20995 | 1126 |
| 848425 | 1437 | 1452 | GGGCAAAGAGGTCCAC | 0 | 21409 | 21424 | 1127 |
| 849282 | N/A | N/A | CATCAGGCCTACTTCA | 0 | 21624 | 21639 | 1128 |
| 848441 | 1603 | 1618 | GAGAAGTGGATCAGTC | 0 | 22096 | 22111 | 1129 |
| 849298 | N/A | N/A | TGCAAAAAGGGCCTGG | 0 | 22482 | 22497 | 1130 |
| 848457 | 1720 | 1735 | CTGCAAAACAGCTGCC | 13 | 22502 | 22517 | 1131 |
| 848473 | 1780 | 1795 | GCGCAGCGGGCGACGG | 0 | 22562 | 22577 | 1132 |
| 849314 | N/A | N/A | ATCCAGCCAGCTCCAC | 7 | 23207 | 23222 | 1133 |
| 848487 | 1934 | 1949 | TAGCAGGCAGCACCTG | 0 | 23554 | 23569 | 1134 |
| 848503 | 2004 | 2019 | GGCAGTGGACACGGGT | 26 | 23624 | 23639 | 1135 |
| 849330 | N/A | N/A | GGCAGAACCAGAGTAT | 0 | 23784 | 23799 | 1136 |
| 849346 | N/A | N/A | CAATAGTTGCCTATAC | 0 | 24201 | 24216 | 1137 |
| 849362 | N/A | N/A | AGACACACCCATTGGC | 8 | 24948 | 24963 | 1138 |
| 848519 | 2198 | 2213 | GGCCGGGATTCCATGC | 0 | 25529 | 25544 | 1139 |
| 849378 | N/A | N/A | ACGCAGCACCCCACCC | 0 | 25581 | 25596 | 1140 |
| 849394 | N/A | N/A | AAGGAGAGTTATACAC | 53 | 26209 | 26224 | 1141 |
| 849410 | N/A | N/A | GGACACAACCGTGTAT | 0 | 27220 | 27235 | 1142 |
| 848535 | 2447 | 2462 | ACCCATCCTGGGATGG | 0 | 27590 | 27605 | 1143 |
| 848551 | 2556 | 2571 | GGAAAGGCGGAAGCAT | 38 | 27699 | 27714 | 1144 |
| 848567 | 2684 | 2699 | TTGAATGGTGAAATGC | 65 | 27827 | 27842 | 1145 |
| 848582 | 2731 | 2746 | CGGCACATTGGGAGCA | 33 | 27874 | 27889 | 1146 |
| 848598 | 2774 | 2789 | CACGGAACAAGAGCTC | 68 | 27917 | 27932 | 1147 |
| 848614 | 2872 | 2887 | CCCCAACGATGTTTGT | 32 | 28015 | 28030 | 1148 |
| 848630 | 2964 | 2979 | CAGAAAGCTAAGCCTC | 72 | 28107 | 28122 | 1149 |
| 466853 | 3067 | 3082 | GCACAGCCTGGCATAG | 51 | 28210 | 28225 | 1150 |
| 848660 | 3130 | 3145 | ACTGCACACTGCCGAG | 1 | 28273 | 28288 | 1151 |
| 848676 | 3218 | 3233 | GTTCCAGGTTTCTTCC | 43 | 28361 | 28376 | 1152 |
| 848691 | 3248 | 3263 | TGTGTGAGCTTGGCAG | 22 | 28391 | 28406 | 1153 |
| 848707 | 3284 | 3299 | AGCCAGCCCAATCTGC | 0 | 28427 | 28442 | 1154 |
| 848723 | 3348 | 3363 | CCTCACTGTTACCCGT | 36 | 28491 | 28506 | 1155 |
| 848739 | 3429 | 3444 | GATAACGGAAAAAGTT | 0 | 28572 | 28587 | 1156 |
| 848754 | 3543 | 3558 | ATAAATGTCTGCTTGC | 52 | 28686 | 28701 | 1157 |
| 848770 | 3603 | 3618 | AGCAAAACAGGTCTAG | 60 | 28746 | 28761 | 1158 |

TABLE 16
Inhibition of PCSK9 mRNA by 3-10-3 cEt gapmers targeting SEQ ID NO: 1 and 2

| | SEQ ID: 1 | SEQ ID: 1 | | % | SEQ ID: 2 | SEQ ID: 2 | SEQ |
|---|---|---|---|---|---|---|---|
| ISIS No | Start Site | Stop Site | Sequence | inhibition | Start Site | Stop Site | ID NO |
| 848303 | 756 | 771 | ACTTCAAGGCCAGCTC | 43 | N/A | N/A | 1159 |
| 848214 | 105 | 120 | AACTGAACGGCGGCGC | 0 | 3580 | 3595 | 1160 |
| 848230 | 311 | 326 | ACCTAGAGGCCGTGCG | 30 | 3786 | 3801 | 1161 |
| 848246 | 484 | 499 | CGCAAGGCTAGCACCA | 45 | 3959 | 3974 | 1162 |
| 848787 | N/A | N/A | GGCGAGGCAGAAACTG | 29 | 4379 | 4394 | 1163 |
| 848803 | N/A | N/A | TCAAGGATAAGTGACT | 42 | 5026 | 5041 | 1164 |
| 848819 | N/A | N/A | AGAAACATCCTCAAGG | 38 | 5517 | 5532 | 1165 |
| 848835 | N/A | N/A | TAATCTATGCAGCAAA | 0 | 6408 | 6423 | 1166 |
| 848851 | N/A | N/A | CCAAATTTCCACATGA | 41 | 6797 | 6812 | 1167 |
| 848867 | N/A | N/A | AAGGAATACCTGAAGG | 22 | 7153 | 7168 | 1168 |
| 848883 | N/A | N/A | CCTCAGATACCTCTGC | 17 | 7359 | 7374 | 1169 |
| 848899 | N/A | N/A | GTATAGTAGATGATAA | 0 | 7719 | 7734 | 1170 |
| 848261 | 576 | 591 | TGCCAGGCAACCTCCA | 14 | 7849 | 7864 | 1171 |
| 848274 | 672 | 687 | TGAGGTATCCCCGGCG | 14 | 7945 | 7960 | 1172 |
| 848288 | 688 | 703 | ACATGCAGGATCTTGG | 16 | 7961 | 7976 | 1173 |
| 848915 | N/A | N/A | AGCCAGTAGTTACTGT | 9 | 8176 | 8191 | 1174 |
| 848931 | N/A | N/A | GAAGATGTGACATCCA | 28 | 8517 | 8532 | 1175 |
| 848947 | N/A | N/A | GAGCAGACTGATGGAA | 4 | 8971 | 8986 | 1176 |
| 848963 | N/A | N/A | GTGGTAACAGCCTCCT | 26 | 9526 | 9541 | 1177 |
| 848979 | N/A | N/A | GGACAGACTAGGAGCC | 4 | 10363 | 10378 | 1178 |
| 848318 | 858 | 873 | ATTCATCCGCCCGGTA | 0 | 10619 | 10634 | 1179 |
| 848995 | N/A | N/A | AGGTAGGCAGAGGCAT | 20 | 11052 | 11067 | 1180 |
| 849011 | N/A | N/A | GGCCGGGTCAGCACAC | 0 | 11785 | 11800 | 1181 |
| 849027 | N/A | N/A | GGCCCATGCTTGTGGC | 0 | 12663 | 12678 | 1182 |
| 849043 | N/A | N/A | AGGAATGGATTAATCT | 48 | 13024 | 13039 | 1183 |
| 849044 | N/A | N/A | GGATACACAGGCTCGC | 81 | 13108 | 13123 | 337 |
| 849059 | N/A | N/A | TCTAAGTGCAGGCGGT | 23 | 13776 | 13791 | 1184 |
| 849075 | N/A | N/A | CAGCAAGGTGGGCAGA | 10 | 14274 | 14289 | 1185 |
| 849091 | N/A | N/A | GCACAGTCCGAACTGT | 0 | 14660 | 14675 | 1186 |
| 849107 | N/A | N/A | GCGGAAATGGCCTGGC | 0 | 15353 | 15368 | 1187 |
| 849123 | N/A | N/A | GGAGAATAACAGTGAT | 62 | 15855 | 15870 | 1188 |
| 849139 | N/A | N/A | AACCTTATAGTTAACA | 0 | 16215 | 16230 | 1189 |
| 848333 | 983 | 998 | GTCCTCCTCGGGCACA | 18 | 16375 | 16390 | 1190 |
| 468457 | 1017 | 1032 | CACACTTGCTGGCCTG | 0 | 16647 | 16662 | 1191 |
| 848363 | 1060 | 1075 | TCCCGGCCGCTGACCA | 30 | 16690 | 16705 | 1192 |
| 468460 | 1075 | 1090 | TTGGCCACGCCGGCAT | 0 | 16705 | 16720 | 48 |
| 848378 | 1084 | 1099 | CTGGCACCCTTGGCCA | 0 | 16714 | 16729 | 1193 |
| 849155 | N/A | N/A | AGACATCACCGGATTT | 42 | 17074 | 17089 | 1194 |
| 849171 | N/A | N/A | CTGTAGGAAAGTCTCA | 49 | 17685 | 17700 | 1195 |
| 849187 | N/A | N/A | GGACACACAATCACCT | 14 | 18033 | 18048 | 1196 |
| 849203 | N/A | N/A | CAGTAACAGTTCTAAC | 0 | 18706 | 18721 | 1197 |
| 849219 | N/A | N/A | CTTATTATCCCTTTCC | 29 | 19395 | 19410 | 1198 |
| 849235 | N/A | N/A | TCAAATTCTGCAGGAA | 0 | 19653 | 19668 | 1199 |
| 848394 | 1163 | 1178 | CCGAATAAACTCCAGG | 42 | 19994 | 20009 | 1200 |
| 848410 | 1324 | 1339 | GAGTAGAGGCAGGCAT | 0 | 20155 | 20170 | 1201 |
| 849251 | N/A | N/A | CCAAAGCCAGAAGGGT | 32 | 20317 | 20332 | 1202 |
| 849267 | N/A | N/A | TTCTAAGTGCCACGGG | 56 | 21029 | 21044 | 1203 |
| 848426 | 1455 | 1470 | CAATGATGTCCTCCCC | 0 | 21427 | 21442 | 1204 |
| 849283 | N/A | N/A | TCCCGATCAAATGTCC | 0 | 21772 | 21787 | 1205 |
| 848442 | 1606 | 1621 | GCAGAGAAGTGGATCA | 0 | 22099 | 22114 | 1206 |
| 849299 | N/A | N/A | TGCCAACCTGCAAAAA | 0 | 22490 | 22505 | 1207 |
| 848458 | 1728 | 1743 | ATACAGTCCTGCAAAA | 0 | 22510 | 22525 | 1208 |
| 848474 | 1803 | 1818 | AGCTCAGCAGCTCCTC | 11 | 22585 | 22600 | 1209 |
| 849315 | N/A | N/A | ATCCAGGAGGCCAAAG | 0 | 23228 | 23243 | 1210 |
| 848488 | 1937 | 1952 | GGGTAGCAGGCAGCAC | 0 | 23557 | 23572 | 1211 |
| 848504 | 2005 | 2020 | TGGCAGTGGACACGGG | 17 | 23625 | 23640 | 1212 |
| 849331 | N/A | N/A | GGAGAAGTAAGGTCAC | 52 | 23827 | 23842 | 1213 |
| 849347 | N/A | N/A | GTCAATAGTTGCCTAT | 13 | 24203 | 24218 | 1214 |
| 849363 | N/A | N/A | GTTCAAGGGTAAGCCG | 25 | 25011 | 25026 | 1215 |
| 849379 | N/A | N/A | TGGCACAAACTGACAC | 0 | 25619 | 25634 | 1216 |
| 849395 | N/A | N/A | TTAAGAGTGGACTCCT | 10 | 26260 | 26275 | 1217 |
| 849411 | N/A | N/A | CCAAAGTGCAGACGGC | 0 | 27260 | 27275 | 1218 |
| 848520 | 2222 | 2237 | GGCCACGGTCACCTGC | 0 | 27365 | 27380 | 1219 |
| 848536 | 2455 | 2470 | CCCCAGACACCCATCC | 26 | 27598 | 27613 | 1220 |
| 848552 | 2558 | 2573 | CCGGAAAGGCGGAAGC | 0 | 27701 | 27716 | 1221 |
| 848568 | 2700 | 2715 | GCACAGCTCGACCTGT | 3 | 27843 | 27858 | 1222 |
| 848583 | 2737 | 2752 | GGACATCGGCACATTG | 68 | 27880 | 27895 | 1223 |
| 848599 | 2775 | 2790 | GCACGGAACAAGAGCT | 19 | 27918 | 27933 | 1224 |
| 848615 | 2885 | 2900 | TTTCACACTCACCCCC | 7 | 28028 | 28043 | 1225 |
| 848631 | 2967 | 2982 | ATCCAGAAAGCTAAGC | 1 | 28110 | 28125 | 1226 |
| 848645 | 3072 | 3087 | TGCTAGCACAGCCTGG | 19 | 28215 | 28230 | 1227 |
| 848661 | 3131 | 3146 | CACTGCACACTGCCGA | 11 | 28274 | 28289 | 1228 |
| 848677 | 3219 | 3234 | GGTTCCAGGTTTCTTC | 61 | 28362 | 28377 | 1229 |
| 848692 | 3249 | 3264 | CTGTGTGAGCTTGGCA | 69 | 28392 | 28407 | 1230 |
| 848708 | 3288 | 3303 | TCAGAGCCAGCCCAAT | 8 | 28431 | 28446 | 1231 |
| 848724 | 3378 | 3393 | GAGCTTCCTGGTCTGT | 47 | 28521 | 28536 | 1232 |
| 848740 | 3431 | 3446 | GTGATAACGGAAAAAG | 65 | 28574 | 28589 | 1233 |
| 848755 | 3545 | 3560 | AGATAAATGTCTGCTT | 14 | 28688 | 28703 | 1234 |
| 848771 | 3616 | 3631 | TTCAAGTTACAAAAGC | 57 | 28759 | 28774 | 1235 |

TABLE 17
Inhibition of PCSK9 mRNA by 3-10-3 cEt gapmers targeting SEQ ID NO: 1 and 2

| | SEQ ID: 1 | SEQ ID: 1 | | % | SEQ ID: 2 | SEQ ID: 2 | SEQ |
|---|---|---|---|---|---|---|---|
| ISIS No | Start Site | Stop Site | Sequence | inhibition | Start Site | Stop Site | ID NO |
| 848306 | 759 | 774 | GCAACTTCAAGGCCAG | 84 | N/A | N/A | 1236 |
| 848217 | 149 | 164 | AGCCAGTCTCACTGCC | 30 | 3624 | 3639 | 1237 |
| 848233 | 362 | 377 | GCTGACGGTGCCCATG | 51 | 3837 | 3852 | 1238 |
| 848249 | 487 | 502 | GAACGCAAGGCTAGCA | 5 | 3962 | 3977 | 1239 |
| 848790 | N/A | N/A | CCAAATCGGAACCCAC | 88 | 4478 | 4493 | 1240 |
| 848806 | N/A | N/A | ACAGAACTTTCCCTTC | 57 | 5114 | 5129 | 1241 |
| 848822 | N/A | N/A | TAAATTCGATTCCCAC | 32 | 5600 | 5615 | 1242 |
| 848838 | N/A | N/A | AGGCAGTAATGGGCAA | 92 | 6461 | 6476 | 1243 |
| 848854 | N/A | N/A | TCCAACACTGAGGACC | 93 | 6811 | 6826 | 1244 |
| 848870 | N/A | N/A | AAAGGCAACACTTCTT | 61 | 7222 | 7237 | 1245 |
| 848886 | N/A | N/A | CAATATTTACTGGTTG | 57 | 7409 | 7424 | 1246 |
| 848902 | N/A | N/A | CTTACAAATTACAACA | 59 | 7751 | 7766 | 1247 |
| 848264 | 622 | 637 | TCTGACTGCGAGAGGT | 71 | 7895 | 7910 | 1248 |
| 466849 | 675 | 690 | TGGTGAGGTATCCCCG | 48 | 7948 | 7963 | 1249 |
| 468444 | 691 | 706 | AAGACATGCAGGATCT | 30 | 7964 | 7979 | 1250 |
| 848918 | N/A | N/A | GACCAATGGGTTTGAT | 13 | 8311 | 8326 | 1251 |
| 848934 | N/A | N/A | GAGAATACCCAGTCCC | 50 | 8550 | 8565 | 1252 |
| 848950 | N/A | N/A | GCTCAAGGGAAAGGCC | 3 | 9044 | 9059 | 1253 |
| 848966 | N/A | N/A | GGACAAGAGTGCATCA | 6 | 10011 | 10026 | 1254 |
| 848982 | N/A | N/A | GGCCTTACCTGATCAA | 12 | 10437 | 10452 | 1255 |
| 848998 | N/A | N/A | CTAGAACCCTTCATTC | 0 | 11304 | 11319 | 1256 |
| 849014 | N/A | N/A | TCTCACCTGGTTGGAA | 31 | 11856 | 11871 | 1257 |
| 849030 | N/A | N/A | GTTAAGAGTGCAGGGT | 90 | 12708 | 12723 | 1258 |
| 849044 | N/A | N/A | GGATACACAGGCTCGC | 92 | 13108 | 13123 | 337 |
| 849046 | N/A | N/A | CCGTAGGTCTTGGCTA | 65 | 13166 | 13181 | 1259 |
| 849062 | N/A | N/A | AGCTGTACCTGGGTTC | 79 | 13888 | 13903 | 1260 |
| 849078 | N/A | N/A | CCTAGAGGAACCACTA | 51 | 14340 | 14355 | 1261 |
| 849094 | N/A | N/A | ACATGAATTTCAGGCA | 73 | 14731 | 14746 | 1262 |
| 849110 | N/A | N/A | TCTCAGCCAGGCCAAA | 0 | 15411 | 15426 | 1263 |
| 849126 | N/A | N/A | CCCTATTATAGCCTTT | 67 | 15920 | 15935 | 1264 |
| 848321 | 890 | 905 | CTCCACCAGGCTGCCT | 0 | 16282 | 16297 | 1265 |
| 848336 | 986 | 1001 | CCCGTCCTCCTCGGGC | 0 | 16378 | 16393 | 1266 |
| 849142 | N/A | N/A | CCATCAGACGGCCGTG | 48 | 16417 | 16432 | 1267 |
| 848350 | 1020 | 1035 | TGTCACACTTGCTGGC | 45 | 16650 | 16665 | 1268 |
| 848365 | 1064 | 1079 | GGCATCCCGGCCGCTG | 62 | 16694 | 16709 | 1269 |
| 468460 | 1075 | 1090 | TTGGCCACGCCGGCAT | 0 | 16705 | 16720 | 48 |
| 848381 | 1098 | 1113 | GCAGGCTGCGCATGCT | 42 | 16728 | 16743 | 1270 |
| 849158 | N/A | N/A | TGCAAGCAGAAGATAG | 39 | 17153 | 17168 | 1271 |
| 849174 | N/A | N/A | CAGGAACTGACCTGAC | 21 | 17808 | 17823 | 1272 |
| 849190 | N/A | N/A | TACAGCTGCTAGTTAT | 59 | 18086 | 18101 | 1273 |
| | | | | | 18399 | 18414 | |
| 849206 | N/A | N/A | GTGCAGGCCATGGTCT | 58 | 19054 | 19069 | 1274 |
| 849222 | N/A | N/A | ATATACGAACTCAGGG | 0 | 19426 | 19441 | 1275 |
| 849238 | N/A | N/A | GGCCTTAAGAGAACAG | 46 | 19734 | 19749 | 1276 |
| 848397 | 1178 | 1193 | GACCAGCTGGCTTTTC | 2 | 20009 | 20024 | 1277 |
| 849254 | N/A | N/A | CCCAAAGAGTATTGGG | 0 | 20552 | 20567 | 1278 |
| 849270 | N/A | N/A | AACTATTCGGTGTATC | 67 | 21051 | 21066 | 1279 |
| 848413 | 1358 | 1373 | CCCAACTGTGATGACC | 0 | 21330 | 21345 | 1280 |
| 848429 | 1485 | 1500 | CAAAGCAGGTGCTGCA | 36 | 21457 | 21472 | 1281 |
| 849286 | N/A | N/A | AGGTAAGACAGCCTCC | 53 | 21856 | 21871 | 1282 |
| 848445 | 1619 | 1634 | GATGACATCTTTGGCA | 59 | 22112 | 22127 | 1283 |
| 848461 | 1732 | 1747 | GACCATACAGTCCTGC | 17 | 22514 | 22529 | 1284 |
| 848477 | 1816 | 1831 | GAGAAACTGGAGCAGC | 0 | 22598 | 22613 | 1285 |
| 849302 | N/A | N/A | TAGCAGATCGCTGACC | 67 | 22948 | 22963 | 1286 |
| 849318 | N/A | N/A | ACTCAAGCACCCTCAT | 0 | 23394 | 23409 | 1287 |
| 848491 | 1985 | 2000 | CATGCTGGCCTCAGCT | 11 | 23605 | 23620 | 1288 |
| 848507 | 2008 | 2023 | TGGTGGCAGTGGACAC | 71 | 23628 | 23643 | 1289 |
| 849334 | N/A | N/A | AATGAGGCAGGTAATA | 19 | 23879 | 23894 | 1290 |
| 849350 | N/A | N/A | CCTCAGGGCACCATCC | 72 | 24293 | 24308 | 1291 |
| 849366 | N/A | N/A | GGGAAAACACCATCTT | 31 | 25120 | 25135 | 1292 |
| 849382 | N/A | N/A | AGCATCTACCTGGCAA | 39 | 25666 | 25681 | 1293 |
| 849398 | N/A | N/A | GTGTACCCAGGGCAAG | 59 | 26373 | 26388 | 1294 |
| 849414 | N/A | N/A | AAGCACATGTCTAGCG | 8 | 27331 | 27346 | 1295 |
| 848523 | 2246 | 2261 | AGTCAGGGTCCAGCCC | 63 | 27389 | 27404 | 1296 |
| 848539 | 2487 | 2502 | CATTTTAAAGCTCAGC | 87 | 27630 | 27645 | 1297 |
| 848555 | 2580 | 2595 | CTCAAGGGCCAGGCCA | 70 | 27723 | 27738 | 1298 |
| 848571 | 2708 | 2723 | GCACCCGAGCACAGCT | 75 | 27851 | 27866 | 1299 |
| 848586 | 2743 | 2758 | GCCCACGGACATCGGC | 58 | 27886 | 27901 | 1300 |
| 848602 | 2778 | 2793 | CTGGCACGGAACAAGA | 8 | 27921 | 27936 | 1301 |
| 848618 | 2904 | 2919 | GATGAGGGCCATCAGC | 87 | 28047 | 28062 | 1302 |
| 848633 | 2978 | 2993 | GGCTAGATGCCATCCA | 64 | 28121 | 28136 | 1303 |
| 848648 | 3093 | 3108 | CCGCAGGCCACCTTTG | 12 | 28236 | 28251 | 1304 |
| 848664 | 3146 | 3161 | AGACAGTGCATGCACC | 10 | 28289 | 28304 | 1305 |
| 848680 | 3222 | 3237 | TCTGGTTCCAGGTTTC | 89 | 28365 | 28380 | 1306 |
| 848695 | 3255 | 3270 | TTCCTGCTGTGTGAGC | 63 | 28398 | 28413 | 1307 |
| 848711 | 3304 | 3319 | AAGAAGAGGCTTGGCT | 38 | 28447 | 28462 | 1308 |
| 848727 | 3382 | 3397 | CACCGAGCTTCCTGGT | 66 | 28525 | 28540 | 1309 |
| 848743 | 3446 | 3461 | GTGAATCAGGCCTGGG | 31 | 28589 | 28604 | 1310 |
| 848758 | 3558 | 3573 | GGACAGACCCAAAAGA | 71 | 28701 | 28716 | 1311 |
| 848774 | 3641 | 3656 | TGCTACAAAACCCAGA | 95 | 28784 | 28799 | 1312 |

TABLE 18
Inhibition of PCSK9 mRNA by 3-10-3 cEt gapmers targeting SEQ ID NO: 1 and 2

| | SEQ ID: 1 | SEQ ID: 1 | | % | SEQ ID: 2 | SEQ ID: 2 | SEQ |
|---|---|---|---|---|---|---|---|
| ISIS No | Start Site | Stop Site | Sequence | inhibition | Start Site | Stop Site | ID NO |
| 848218 | 153 | 168 | CCCGAGCCAGTCTCAC | 1 | 3628 | 3643 | 1313 |
| 848234 | 368 | 383 | CCTGGAGCTGACGGTG | 18 | 3843 | 3858 | 1314 |
| 848250 | 488 | 503 | GGAACGCAAGGCTAGC | 77 | 3963 | 3978 | 1315 |
| 848791 | N/A | N/A | TTCCAAACCAAATCGG | 46 | 4485 | 4500 | 1316 |
| 848807 | N/A | N/A | GGACAAAACTGCAAGT | 42 | 5170 | 5185 | 1317 |
| 848823 | N/A | N/A | TTCTAAATTCGATTCC | 61 | 5603 | 5618 | 1318 |
| 848839 | N/A | N/A | TTAGAAAGGCAGTAAT | 30 | 6467 | 6482 | 1319 |
| 848855 | N/A | N/A | CAAGGACGGCACCAAG | 37 | 6881 | 6896 | 1320 |
| 848871 | N/A | N/A | GAAGGGATGACTAAGT | 0 | 7242 | 7257 | 1321 |
| 848887 | N/A | N/A | AGGAAACCGTGGACCT | 60 | 7437 | 7452 | 1322 |
| 848903 | N/A | N/A | CCTACTTACAAATTAC | 4 | 7755 | 7770 | 1323 |
| 848265 | 633 | 648 | GGGCAGTGCGCTCTGA | 78 | 7906 | 7921 | 1324 |
| 848276 | 676 | 691 | TTGGTGAGGTATCCCC | 66 | 7949 | 7964 | 1325 |
| 848291 | 692 | 707 | GAAGACATGCAGGATC | 61 | 7965 | 7980 | 1326 |
| 848919 | N/A | N/A | GGCAGACCAATGGGTT | 10 | 8315 | 8330 | 1327 |
| 848935 | N/A | N/A | TAAGATTTGAAGCACT | 60 | 8580 | 8595 | 1328 |
| 848951 | N/A | N/A | CTGAACTGTAAGCTCA | 46 | 9055 | 9070 | 1329 |
| 848967 | N/A | N/A | GGCACTAGCAGGAGTT | 62 | 10031 | 10046 | 1330 |
| 848983 | N/A | N/A | ATGGATTCAGCTCAGA | 66 | 10680 | 10695 | 1331 |
| 848999 | N/A | N/A | TCCAACTAGAACCCTT | 87 | 11309 | 11324 | 1332 |
| 849015 | N/A | N/A | CACTGAAGAGGTCTCA | 17 | 11867 | 11882 | 1333 |
| 849031 | N/A | N/A | AGGAACCTGAAGATCA | 72 | 12756 | 12771 | 1334 |
| 849044 | N/A | N/A | GGATACACAGGCTCGC | 85 | 13108 | 13123 | 337 |
| 849047 | N/A | N/A | TAATAATGCCCCCGTA | 49 | 13177 | 13192 | 1335 |
| 849063 | N/A | N/A | AGTTAGCCCAGGTGAG | 6 | 1395 | 13966 | 1336 |
| 849079 | N/A | N/A | CGCCACCCTAGAGGAA | 0 | 14346 | 14361 | 1337 |
| 849095 | N/A | N/A | AGCAATTCAGTGGCTG | 49 | 14759 | 14774 | 1338 |
| 849111 | N/A | N/A | CTCCAGCGCAGGTCTC | 35 | 15433 | 15448 | 1339 |
| 849127 | N/A | N/A | GTGTAAAATAAAGCCC | 77 | 15934 | 15949 | 1340 |
| 848322 | 900 | 915 | GGAGATACACCTCCAC | 15 | 16292 | 16307 | 1341 |
| 848337 | 987 | 1002 | TCCCGTCCTCCTCGGG | 8 | 16379 | 16394 | 1342 |
| 849143 | N/A | N/A | GGACAGTGACAGCTGG | 39 | 16524 | 16539 | 1343 |
| 848351 | 1021 | 1036 | CTGTCACACTTGCTGG | 8 | 16651 | 16666 | 1344 |
| 848366 | 1070 | 1085 | CACGCCGGCATCCCGG | 3 | 16700 | 16715 | 1345 |
| 468460 | 1075 | 1090 | TTGGCCACGCCGGCAT | 0 | 16705 | 16720 | 48 |
| 848382 | 1100 | 1115 | GCGCAGGCTGCGCATG | 0 | 16730 | 16745 | 1346 |
| 849159 | N/A | N/A | ATGCAAGTGAGTGAGT | 74 | 17187 | 17202 | 1347 |
| 849175 | N/A | N/A | GGAAAGAACAGCCTCC | 44 | 17842 | 17857 | 1348 |
| 849191 | N/A | N/A | GATACAGACACCCACC | 37 | 18250 | 18265 | 1349 |
| 849207 | N/A | N/A | TACCATAACTCCCCAC | 37 | 19123 | 19138 | 1350 |
| 849223 | N/A | N/A | ATCAAACTAGCCAACC | 0 | 19482 | 19497 | 1351 |
| 849239 | N/A | N/A | GAAGACGGAGTAAGGC | 81 | 19795 | 19810 | 1352 |
| 848398 | 1183 | 1198 | GGCTGGACCAGCTGGC | 0 | 20014 | 20029 | 1353 |
| 849255 | N/A | N/A | GGCCCAAAGAGTATTG | 0 | 20554 | 20569 | 1354 |
| 849271 | N/A | N/A | GAAACTATTCGGTGTA | 38 | 21053 | 21068 | 1355 |
| 848414 | 1370 | 1385 | GGCATTGGTGGCCCCA | 19 | 21342 | 21357 | 1356 |
| 848430 | 1492 | 1507 | TGTGACACAAAGCAGG | 84 | 21464 | 21479 | 1357 |
| 849287 | N/A | N/A | CGAAGGTAAGCCGCCT | 56 | 21889 | 21904 | 1358 |
| 848446 | 1626 | 1641 | CCTCATTGATGACATC | 0 | 22119 | 22134 | 1359 |
| 848462 | 1733 | 1748 | TGACCATACAGTCCTG | 19 | 22515 | 22530 | 1360 |
| 848478 | 1842 | 1857 | GCTCGCCCCGCCGCTT | 35 | 22624 | 22639 | 1361 |
| 849303 | N/A | N/A | GGCTGAGTCCAGAGTA | 89 | 22962 | 22977 | 1362 |
| 849319 | N/A | N/A | GAAATGGGAATCTGCT | 0 | 23454 | 23469 | 1363 |
| 848492 | 1986 | 2001 | CCATGCTGGCCTCAGC | 32 | 23606 | 23621 | 1364 |
| 849335 | N/A | N/A | CAGCTATAGAGCGGCA | 0 | 24045 | 24060 | 1365 |
| 849351 | N/A | N/A | GAACAGCTCAGCCTCA | 0 | 24304 | 24319 | 1366 |
| 849367 | N/A | N/A | AGCCTTAGTTTCTCAG | 25 | 25135 | 25150 | 1367 |
| 848508 | 2047 | 2062 | TCCCAGTGGGAGCTGC | 0 | 25378 | 25393 | 1368 |
| 849383 | N/A | N/A | CCACAGCATCTACCTG | 80 | 25670 | 25685 | 1369 |
| 849399 | N/A | N/A | CCAGGAAGAGCACCTG | 17 | 26406 | 26421 | 1370 |
| 849415 | N/A | N/A | AGAAAGCACATGTCTA | 0 | 27334 | 27349 | 1371 |
| 848524 | 2250 | 2265 | AGCCAGTCAGGGTCCA | 55 | 27393 | 27408 | 1372 |
| 848540 | 2490 | 2505 | AACCATTTTAAAGCTC | 45 | 27633 | 27648 | 1373 |
| 848556 | 2582 | 2597 | CACTCAAGGGCCAGGC | 37 | 27725 | 27740 | 1374 |
| 848572 | 2709 | 2724 | AGCACCCGAGCACAGC | 89 | 27852 | 27867 | 1375 |
| 848587 | 2752 | 2767 | AGTCATTCTGCCCACG | 78 | 27895 | 27910 | 1376 |
| 848603 | 2779 | 2794 | CCTGGCACGGAACAAG | 51 | 27922 | 27937 | 1377 |
| 848619 | 2906 | 2921 | GAGATGAGGGCCATCA | 80 | 28049 | 28064 | 1378 |
| 848634 | 2999 | 3014 | GCGCACCTGTCTCCAG | 0 | 28142 | 28157 | 1379 |
| 848649 | 3110 | 3125 | TCCTAGGTGATGGCTC | 80 | 28253 | 28268 | 1380 |
| 848665 | 3148 | 3163 | TGAGACAGTGCATGCA | 37 | 28291 | 28306 | 1381 |
| 848681 | 3223 | 3238 | CTCTGGTTCCAGGTTT | 43 | 28366 | 28381 | 1382 |
| 848696 | 3256 | 3271 | GTTCCTGCTGTGTGAG | 78 | 28399 | 28414 | 1383 |
| 848712 | 3306 | 3321 | GTAAGAAGAGGCTTGG | 75 | 28449 | 28464 | 1384 |
| 848728 | 3383 | 3398 | TCACCGAGCTTCCTGG | 50 | 28526 | 28541 | 1385 |
| 848744 | 3451 | 3466 | GGCCAGTGAATCAGGC | 17 | 28594 | 28609 | 1386 |
| 848759 | 3563 | 3578 | AGAGAGGACAGACCCA | 83 | 28706 | 28721 | 1387 |
| 848775 | 3644 | 3659 | AAATGCTACAAAACCC | 67 | 28787 | 28802 | 1388 |
| 848307 | 760 | 775 | GGCAACTTCAAGGCCA | 0 | N/A | N/A | 1389 |

TABLE 19
Inhibition of PCSK9 mRNA by 3-10-3 cEt gapmers targeting SEQ ID NO: 1 and 2

| | SEQ ID: 1 | SEQ ID: 1 | | % | SEQ ID: 2 | SEQ ID: 2 | SEQ |
|---|---|---|---|---|---|---|---|
| ISIS No | Start Site | Stop Site | Sequence | inhibition | Start Site | Stop Site | ID NO |
| 848219 | 181 | 196 | CGCTGCTGCAACGACG | 66 | 3656 | 3671 | 1390 |
| 848235 | 378 | 393 | ACCAGGACCGCCTGGA | 0 | 3853 | 3868 | 1391 |
| 848251 | 489 | 504 | CGGAACGCAAGGCTAG | 62 | 3964 | 3979 | 1392 |
| 848792 | N/A | N/A | GTCATAAAGAAATTGC | 47 | 4593 | 4608 | 1393 |
| 848808 | N/A | N/A | TGGCAGAATTTTCCCC | 17 | 5249 | 5264 | 1394 |
| 848824 | N/A | N/A | TTTCATTCTAAATTCG | 58 | 5608 | 5623 | 1395 |
| 848840 | N/A | N/A | CTTTACCCAAAGCCTT | 0 | 6523 | 6538 | 1396 |
| 848856 | N/A | N/A | CATAGCGGGAGAACTT | 51 | 6908 | 6923 | 1397 |
| 848872 | N/A | N/A | GCAGAAGGGATGACTA | 53 | 7245 | 7260 | 1398 |
| 848888 | N/A | N/A | AGCCAGGAAACCGTGG | 63 | 7441 | 7456 | 1399 |
| 848904 | N/A | N/A | CCCTACTTACAAATTA | 40 | 7756 | 7771 | 1400 |
| 848266 | 640 | 655 | AGGCGGCGGGCAGTGC | 31 | 7913 | 7928 | 1401 |
| 848277 | 677 | 692 | CTTGGTGAGGTATCCC | 65 | 7950 | 7965 | 1402 |
| 848292 | 693 | 708 | GGAAGACATGCAGGAT | 64 | 7966 | 7981 | 1403 |
| 848920 | N/A | N/A | AGGCAGACCAATGGGT | 63 | 8316 | 8331 | 1404 |
| 848936 | N/A | N/A | CTAGAAGGTGGTGCAG | 0 | 8619 | 8634 | 1405 |
| 848952 | N/A | N/A | CCATAGTCAACTGTAC | 7 | 9097 | 9112 | 1406 |
| 848968 | N/A | N/A | AGCCAATGGGAGGCAC | 15 | 10042 | 10057 | 1407 |
| 848308 | 761 | 776 | GGGCAACTTCAAGGCC | 7 | 10522 | 10537 | 1408 |
| 848984 | N/A | N/A | GGGCAGAGCAAATGGA | 0 | 10691 | 10706 | 1409 |
| 849000 | N/A | N/A | GTTCACCCCAAGCTCT | 29 | 11420 | 11435 | 1410 |
| 849016 | N/A | N/A | CTCCACTGAAGAGGTC | 66 | 11870 | 11885 | 1411 |
| 849032 | N/A | N/A | GATTTAACCCTCCAAA | 0 | 12814 | 12829 | 1412 |
| 849044 | N/A | N/A | GGATACACAGGCTCGC | 86 | 13108 | 13123 | 337 |
| 849048 | N/A | N/A | GTTAATAATGCCCCCG | 80 | 13179 | 13194 | 1413 |
| 849064 | N/A | N/A | GCTGAGTTAGCCCAGG | 51 | 13955 | 13970 | 1414 |
| 849080 | N/A | N/A | AAACAGTGCTCGCCAC | 29 | 14356 | 14371 | 1415 |
| 849096 | N/A | N/A | TACAGAGCAATTCAGT | 33 | 14764 | 14779 | 1416 |
| 849112 | N/A | N/A | TGCCAGGCAGGTCCAG | 0 | 15506 | 15521 | 1417 |
| 849128 | N/A | N/A | CAATATCTAACAATAA | 0 | 15977 | 15992 | 1418 |
| 848323 | 905 | 920 | GTCTAGGAGATACACC | 72 | 16297 | 16312 | 1419 |
| 848338 | 988 | 1003 | GTCCCGTCCTCCTCGG | 33 | 16380 | 16395 | 1420 |
| 849144 | N/A | N/A | AATCAGCAGGTGGCTG | 0 | 16579 | 16594 | 1421 |
| 848352 | 1022 | 1037 | ACTGTCACACTTGCTG | 45 | 16652 | 16667 | 1422 |
| 848367 | 1072 | 1087 | GCCACGCCGGCATCCC | 27 | 16702 | 16717 | 1423 |
| 468460 | 1075 | 1090 | TTGGCCACGCCGGCAT | 2 | 16705 | 16720 | 48 |
| 848383 | 1105 | 1120 | AGCACGCGCAGGCTGC | 0 | 16735 | 16750 | 1424 |
| 849160 | N/A | N/A | CCACATCTGCCTGGCC | 0 | 17226 | 17241 | 1425 |
| 849176 | N/A | N/A | TGCCAGGTCATGCAAT | 0 | 17954 | 17969 | 1426 |
| 849192 | N/A | N/A | GGGATACAGACACCCA | 48 | 18252 | 18267 | 1427 |
| 849208 | N/A | N/A | CCATACCATAACTCCC | 36 | 19126 | 19141 | 1428 |
| 849224 | N/A | N/A | CAATTACACCAGCAAT | 64 | 19496 | 19511 | 1429 |
| 849240 | N/A | N/A | CTGCGAAAATATTTTT | 32 | 19835 | 19850 | 1430 |
| 848399 | 1188 | 1203 | CCACAGGCTGGACCAG | 8 | 20019 | 20034 | 1431 |
| 849256 | N/A | N/A | CCTCAACCGCTCCCAT | 15 | 20631 | 20646 | 1432 |
| 849272 | N/A | N/A | GAGATAGGAAACTATT | 19 | 21060 | 21075 | 1433 |
| 848415 | 1388 | 1403 | GGTCACCGGCTGGTCT | 0 | 21360 | 21375 | 1434 |
| 848431 | 1500 | 1515 | TCCCACTCTGTGACAC | 93 | 21472 | 21487 | 1435 |
| 849288 | N/A | N/A | ACAGACACTAAGCTCT | 76 | 21910 | 21925 | 1436 |
| 848447 | 1628 | 1643 | GGCCTCATTGATGACA | 0 | 22121 | 22136 | 1437 |
| 848463 | 1734 | 1749 | CTGACCATACAGTCCT | 15 | 22516 | 22531 | 1438 |
| 848479 | 1850 | 1865 | CTCCATGCGCTCGCCC | 39 | 22632 | 22647 | 1439 |
| 849304 | N/A | N/A | CTAGAGATGGCTGAGT | 56 | 22970 | 22985 | 1440 |
| 849320 | N/A | N/A | ACGGAAATGGGAATCT | 0 | 23457 | 23472 | 1441 |
| 848493 | 1990 | 2005 | GTCCCCATGCTGGCCT | 33 | 23610 | 23625 | 1442 |
| 849336 | N/A | N/A | ATACAGAGATGTTAAG | 30 | 24079 | 24094 | 1443 |
| 849352 | N/A | N/A | TCTTATTCCAGGCTGG | 23 | 24362 | 24377 | 1444 |
| 849368 | N/A | N/A | AGCTGACCAGCTGTGT | 0 | 25180 | 25195 | 1445 |
| 848509 | 2064 | 2079 | TGCCAAGGTCCTCCAC | 18 | 25395 | 25410 | 1446 |
| 849384 | N/A | N/A | CAAAAACAGACCCAGC | 11 | 25733 | 25748 | 1447 |
| 849400 | N/A | N/A | AAATAGATGCTCCAGG | 35 | 26465 | 26480 | 1448 |
| 849416 | N/A | N/A | CGAGGAAAAGAAAGCA | 20 | 27342 | 27357 | 1449 |
| 848525 | 2254 | 2269 | CTGCAGCCAGTCAGGG | 1 | 27397 | 27412 | 1450 |
| 848541 | 2494 | 2509 | TCGGAACCATTTTAAA | 0 | 27637 | 27652 | 1451 |
| 848557 | 2585 | 2600 | CCCCACTCAAGGGCCA | 0 | 27728 | 27743 | 1452 |
| 848573 | 2710 | 2725 | CAGCACCCGAGCACAG | 23 | 27853 | 27868 | 1453 |
| 848588 | 2755 | 2770 | AAAAGTCATTCTGCCC | 62 | 27898 | 27913 | 1454 |
| 848604 | 2780 | 2795 | GCCTGGCACGGAACAA | 55 | 27923 | 27938 | 1455 |
| 848620 | 2909 | 2924 | CTGGAGATGAGGGCCA | 24 | 28052 | 28067 | 1456 |
| 848635 | 3021 | 3036 | GCACAGCCTGTGACCA | 71 | 28164 | 28179 | 1457 |
| 848650 | 3120 | 3135 | GCCGAGTCAGTCCTAG | 23 | 28263 | 28278 | 1458 |
| 848666 | 3150 | 3165 | GCTGAGACAGTGCATG | 47 | 28293 | 28308 | 1459 |
| 468497 | 3224 | 3239 | CCTCTGGTTCCAGGTT | 77 | 28367 | 28382 | 1460 |
| 848697 | 3257 | 3272 | AGTTCCTGCTGTGTGA | 44 | 28400 | 28415 | 1461 |
| 848713 | 3308 | 3323 | AAGTAAGAAGAGGCTT | 0 | 28451 | 28466 | 1462 |
| 848729 | 3384 | 3399 | CTCACCGAGCTTCCTG | 76 | 28527 | 28542 | 1463 |
| 848745 | 3456 | 3471 | CGCCAGGCCAGTGAAT | 44 | 28599 | 28614 | 1464 |
| 848760 | 3565 | 3580 | ACAGAGAGGACAGACC | 45 | 28708 | 28723 | 1465 |
| 848776 | 3661 | 3676 | AGTCACCATATTAATA | 63 | 28804 | 28819 | 1466 |

TABLE 20
Inhibition of PCSK9 mRNA by 3-10-3 cEt gapmers targeting SEQ ID NO: 1 and 2

| | SEQ ID: 1 | SEQ ID: 1 | | % | SEQ ID: 2 | SEQ ID: 2 | SEQ |
|---|---|---|---|---|---|---|---|
| ISIS No | Start Site | Stop Site | Sequence | inhibition | Start Site | Stop Site | ID NO |
| 848432 | 1535 | 1550 | TGCAATGCCAGCCACG | 0 | N/A | N/A | 1467 |
| 848220 | 184 | 199 | AGCCGCTGCTGCAACG | 57 | 3659 | 3674 | 1468 |
| 848236 | 381 | 396 | GCCACCAGGACCGCCT | 28 | 3856 | 3871 | 1469 |
| 848252 | 492 | 507 | CCTCGGAACGCAAGGC | 38 | 3967 | 3982 | 1470 |
| 848793 | N/A | N/A | AGCATGAGTTCTGTGT | 43 | 4607 | 4622 | 1471 |
| 848809 | N/A | N/A | CAGCACACTCAGACAG | 47 | 5288 | 5303 | 1472 |
| 848825 | N/A | N/A | AAAAGGATTGGTCTAA | 0 | 5652 | 5667 | 1473 |
| 848841 | N/A | N/A | CCCTTTACCCAAAGCC | 71 | 6525 | 6540 | 1474 |
| 848857 | N/A | N/A | AATCAGCCTTCAAGGG | 39 | 6928 | 6943 | 1475 |
| 848873 | N/A | N/A | GGCAGAAGGGATGACT | 35 | 7246 | 7261 | 1476 |
| 848889 | N/A | N/A | TCGACAACAGGTTTTC | 58 | 7576 | 7591 | 1477 |
| 848905 | N/A | N/A | TGACATGGAAGAAACC | 34 | 7801 | 7816 | 1478 |
| 848267 | 642 | 657 | GCAGGCGGCGGGCAGT | 0 | 7915 | 7930 | 1479 |
| 848278 | 678 | 693 | TCTTGGTGAGGTATCC | 52 | 7951 | 7966 | 1480 |
| 848293 | 694 | 709 | TGGAAGACATGCAGGA | 26 | 7967 | 7982 | 1481 |
| 848921 | N/A | N/A | TGCATTGGCACAAGAA | 44 | 8340 | 8355 | 1482 |
| 848937 | N/A | N/A | AGTTAGAGGCCAGGAA | 25 | 8645 | 8660 | 1483 |
| 848953 | N/A | N/A | TCCCATAGTCAACTGT | 11 | 9099 | 9114 | 1484 |
| 848969 | N/A | N/A | TTGCAAAGCTTCCAGT | 7 | 10065 | 10080 | 1485 |
| 468446 | 775 | 790 | ATGTAGTCGACATGGG | 38 | 10536 | 10551 | 1486 |
| 848985 | N/A | N/A | CGAGAAGTGGAAACCA | 0 | 10727 | 10742 | 1487 |
| 849001 | N/A | N/A | GTGAAAGCTGAGTTCA | 6 | 11431 | 11446 | 1488 |
| 849017 | N/A | N/A | GGGTGGTAATTTGTCA | 15 | 12045 | 12060 | 1489 |
| 849033 | N/A | N/A | AATAACTGATTTAACC | 12 | 12821 | 12836 | 1490 |
| 849044 | N/A | N/A | GGATACACAGGCTCGC | 82 | 13108 | 13123 | 337 |
| 849049 | N/A | N/A | GTTCATTCCACTGCTT | 30 | 13216 | 13231 | 1491 |
| 849065 | N/A | N/A | CAACGCACATCGAGCA | 39 | 14038 | 14053 | 1492 |
| 849081 | N/A | N/A | ACCAAACAGTGCTCGC | 48 | 14359 | 14374 | 1493 |
| 849097 | N/A | N/A | AATAAGGTCTGGCTCA | 43 | 14829 | 14844 | 1494 |
| 849113 | N/A | N/A | ACAGATGCCAGGCAGG | 10 | 15511 | 15526 | 1495 |
| 849129 | N/A | N/A | TCAATATCTAACAATA | 0 | 15978 | 15993 | 1496 |
| 848324 | 917 | 932 | CTGTATGCTGGTGTCT | 0 | 16309 | 16324 | 1497 |
| 848339 | 989 | 1004 | GGTCCCGTCCTCCTCG | 0 | 16381 | 16396 | 1498 |
| 849145 | N/A | N/A | CATGAGAAAGACCCCC | 0 | 16611 | 16626 | 1499 |
| 848353 | 1024 | 1039 | TGACTGTCACACTTGC | 56 | 16654 | 16669 | 1500 |
| 848368 | 1073 | 1088 | GGCCACGCCGGCATCC | 0 | 16703 | 16718 | 1501 |
| 468460 | 1075 | 1090 | TTGGCCACGCCGGCAT | 0 | 16705 | 16720 | 48 |
| 848384 | 1109 | 1124 | GTTGAGCACGCGCAGG | 58 | 16739 | 16754 | 1502 |
| 849161 | N/A | N/A | CTCCACCACATCTGCC | 30 | 17231 | 17246 | 1503 |
| 849177 | N/A | N/A | CGTGCCAGGTCATGCA | 74 | 17956 | 17971 | 1504 |
| 849193 | N/A | N/A | TGGGATACAGACACCC | 5 | 18253 | 18268 | 1505 |
| 849209 | N/A | N/A | TAAAAGACTCCATGCC | 0 | 19151 | 19166 | 1506 |
| 849225 | N/A | N/A | GCAATTACACCAGCAA | 84 | 19497 | 19512 | 1507 |
| 849241 | N/A | N/A | GCACAGAGTGATGGTT | 66 | 19908 | 19923 | 1508 |
| 848400 | 1190 | 1205 | CCCCACAGGCTGGACC | 34 | 20021 | 20036 | 1509 |
| 849257 | N/A | N/A | CTGCACCGGGCATGCG | 0 | 20686 | 20701 | 1510 |
| 849273 | N/A | N/A | CCCTACCATAGCCAGG | 36 | 21118 | 21133 | 1511 |
| 848416 | 1394 | 1409 | CCCCAGGGTCACCGGC | 38 | 21366 | 21381 | 1512 |
| 849289 | N/A | N/A | GCACACAGACACTAAG | 0 | 21914 | 21929 | 1513 |
| 848448 | 1633 | 1648 | AACCAGGCCTCATTGA | 0 | 22126 | 22141 | 1514 |
| 848464 | 1735 | 1750 | GCTGACCATACAGTCC | 9 | 22517 | 22532 | 1515 |
| 849305 | N/A | N/A | CTATCCTGTAGCATCA | 73 | 23060 | 23075 | 1516 |
| 849321 | N/A | N/A | GACGGAAATGGGAATC | 0 | 23458 | 23473 | 1517 |
| 848480 | 1875 | 1890 | GGCAGACCAGCTTGCC | 0 | 23495 | 23510 | 1518 |
| 848494 | 1991 | 2006 | GGTCCCCATGCTGGCC | 0 | 23611 | 23626 | 1519 |
| 849337 | N/A | N/A | TAGCACTCATCATTTC | 33 | 24098 | 24113 | 1520 |
| 849353 | N/A | N/A | GACGAGAATCAACTCT | 6 | 24383 | 24398 | 1521 |
| 849369 | N/A | N/A | CACCAGGACTCCTGTG | 4 | 25209 | 25224 | 1522 |
| 848510 | 2074 | 2089 | GGCTTGTGGGTGCCAA | 15 | 25405 | 25420 | 1523 |
| 849385 | N/A | N/A | CTCCAAGTGGAGTGGG | 0 | 25786 | 25801 | 1524 |
| 849401 | N/A | N/A | ACTAAAATAGATGCTC | 34 | 26469 | 26484 | 1525 |
| 849417 | N/A | N/A | TGCCAGAGCCCGAGGA | 0 | 27352 | 27367 | 1526 |
| 848526 | 2259 | 2274 | GGGCACTGCAGCCAGT | 0 | 27402 | 27417 | 1527 |
| 848542 | 2500 | 2515 | GACAAGTCGGAACCAT | 77 | 27643 | 27658 | 1528 |
| 848558 | 2598 | 2613 | GGCAAGGAGGCTGCCC | 0 | 27741 | 27756 | 1529 |
| 848574 | 2711 | 2726 | GCAGCACCCGAGCACA | 70 | 27854 | 27869 | 1530 |
| 848589 | 2756 | 2771 | TAAAAGTCATTCTGCC | 56 | 27899 | 27914 | 1531 |
| 848605 | 2781 | 2796 | TGCCTGGCACGGAACA | 44 | 27924 | 27939 | 1532 |
| 848621 | 2915 | 2930 | AGTTAGCTGGAGATGA | 0 | 28058 | 28073 | 1533 |
| 848636 | 3027 | 3042 | ACCAAGGCACAGCCTG | 70 | 28170 | 28185 | 1534 |
| 848651 | 3121 | 3136 | TGCCGAGTCAGTCCTA | 69 | 28264 | 28279 | 1535 |
| 848667 | 3163 | 3178 | GTGGAGCGGGTTGGCT | 26 | 28306 | 28321 | 1536 |
| 848682 | 3225 | 3240 | CCCTCTGGTTCCAGGT | 23 | 28368 | 28383 | 1537 |
| 848698 | 3259 | 3274 | TCAGTTCCTGCTGTGT | 30 | 28402 | 28417 | 1538 |
| 848714 | 3311 | 3326 | GTGAAGTAAGAAGAGG | 47 | 28454 | 28469 | 1539 |
| 848730 | 3385 | 3400 | ACTCACCGAGCTTCCT | 63 | 28528 | 28543 | 1540 |
| 848746 | 3469 | 3484 | TTAGAAGCATCTCCGC | 44 | 28612 | 28627 | 1541 |
| 848761 | 3569 | 3584 | GGCAACAGAGAGGACA | 79 | 28712 | 28727 | 1542 |
| 848777 | 3666 | 3681 | TAAAAAGTCACCATAT | 9 | 28809 | 28824 | 1543 |

### Example 2: Dose-Dependent Antisense Inhibition of Human PCSK9 in HepG2 Cells by 3-10-3 cEt Gapmers

[0341] Select gapmers from Example 1 exhibiting in vitro inhibition of PCSK9 mRNA were tested at various doses in HepG2 cells. The antisense oligonucleotides were tested in a series of experiments that had similar culture conditions. The results for each experiment are presented in separate tables shown below.

### Study 1

[0342] Cells were plated at a density of 20,000 cells per well and transfected using electroporation with 46.88 nM, 187.5 nM, 750 nM, and 3,000 nM concentrations of antisense oligonucleotide, as specified in the Tables below. ISIS 405879, previously disclosed in WO2008066776 was also included in the study as a benchmark oligonucleotide. After a treatment period of approximately 16 hours, RNA was isolated from the cells and PCSK9 mRNA levels were measured by quantitative real-time PCR. Human PCSK9 primer probe set from ABI (ID4 Hs03037355_m1) was used to measure mRNA levels. PCSK9 mRNA levels were adjusted according to total RNA content, as measured by RIBOGREEN®. Results are presented as percent inhibition of PCSK9, relative to untreated control cells.

[0343] The half maximal inhibitory concentration (IC₅₀) of each oligonucleotide is also presented. PCSK9 mRNA levels were reduced in a dose-dependent manner in antisense oligonucleotide treated cells. Several of the newly designed antisense oligonucleotides demonstrated superior efficacy compared to the previously disclosed oligonucleotide, ISIS 405879. Specifically, ISIS 848542, ISIS 848593, ISIS 848597, ISIS 848598, ISIS 848630, ISIS 848833, ISIS 849040, ISIS 849171, and ISIS 849236 demonstrated superior efficacy compared to the previously disclosed oligonucleotide, ISIS 405879.

TABLE 21

| ISIS | 46.875 | 187.5 | 750 | 3,000 | IC₅₀ |
|---|---|---|---|---|---|
| No | nM | nM | nM | nM | (μM) |
| 405879 | 13 | 6 | 3 | 29 | >3.00 |
| 466847 | 1 | 19 | 65 | 94 | 0.47 |
| 468497 | 12 | 27 | 60 | 83 | 0.48 |
| 848219 | 0 | 0 | 54 | 88 | 0.91 |
| 848241 | 0 | 5 | 31 | 63 | 1.78 |
| 848283 | 18 | 27 | 54 | 85 | 0.48 |
| 848306 | 0 | 19 | 53 | 91 | 0.62 |
| 848323 | 0 | 0 | 0 | 50 | >3.00 |
| 848376 | 0 | 3 | 12 | 43 | >3.00 |
| 848430 | 0 | 30 | 52 | 81 | 0.62 |
| 848431 | 67 | 79 | 92 | 96 | <0.05 |
| 848500 | 6 | 30 | 55 | 82 | 0.54 |
| 848539 | 0 | 0 | 0 | 55 | >3.00 |
| 848542 | 10 | 30 | 66 | 86 | 0.41 |
| 848560 | 12 | 32 | 76 | 91 | 0.33 |
| 848567 | 0 | 1 | 42 | 89 | 0.85 |
| 848570 | 23 | 27 | 67 | 87 | 0.35 |
| 848572 | 18 | 44 | 71 | 81 | 0.30 |
| 848574 | 0 | 5 | 68 | 95 | 0.55 |
| 848575 | 0 | 17 | 51 | 80 | 0.75 |
| 848576 | 11 | 18 | 45 | 74 | 0.86 |
| 848583 | 3 | 18 | 62 | 88 | 0.52 |
| 848584 | 0 | 22 | 54 | 89 | 0.57 |
| 848585 | 1 | 22 | 67 | 92 | 0.45 |
| 848593 | 0 | 25 | 53 | 83 | 0.63 |
| 848596 | 18 | 40 | 76 | 93 | 0.26 |
| 848597 | 22 | 42 | 78 | 87 | 0.24 |
| 848598 | 0 | 18 | 62 | 95 | 0.53 |
| 848616 | 0 | 14 | 55 | 88 | 0.66 |
| 848618 | 0 | 0 | 56 | 77 | 0.96 |
| 848619 | 3 | 7 | 41 | 74 | 1.07 |
| 848629 | 21 | 34 | 78 | 78 | 0.31 |
| 848630 | 7 | 22 | 65 | 83 | 0.50 |
| 848632 | 25 | 34 | 68 | 89 | 0.29 |
| 848635 | 0 | 0 | 49 | 83 | 0.92 |
| 848636 | 5 | 34 | 77 | 76 | 0.42 |
| 848649 | 5 | 10 | 43 | 78 | 0.89 |
| 848651 | 4 | 0 | 48 | 88 | 0.88 |
| 848652 | 0 | 6 | 28 | 80 | 1.16 |
| 848656 | 1 | 13 | 52 | 80 | 0.73 |
| 848670 | 0 | 38 | 84 | 85 | 0.39 |
| 848671 | 26 | 28 | 70 | 81 | 0.34 |
| 848672 | 0 | 11 | 27 | 73 | 1.37 |
| 848674 | 36 | 31 | 69 | 89 | 0.24 |
| 848677 | 2 | 32 | 69 | 90 | 0.41 |
| 848679 | 0 | 11 | 55 | 81 | 0.73 |
| 848680 | 11 | 20 | 64 | 81 | 0.52 |
| 848685 | 0 | 14 | 33 | 62 | 1.63 |
| 848687 | 0 | 25 | 63 | 90 | 0.51 |
| 848688 | 0 | 23 | 61 | 89 | 0.55 |
| 848690 | 15 | 21 | 78 | 84 | 0.39 |
| 848692 | 31 | 45 | 80 | 97 | 0.17 |
| 848693 | 8 | 23 | 69 | 88 | 0.44 |
| 848694 | 27 | 43 | 75 | 93 | 0.21 |
| 848701 | 0 | 10 | 39 | 77 | 1.02 |
| 848704 | 11 | 5 | 43 | 78 | 0.94 |
| 848725 | 0 | 9 | 51 | 81 | 0.79 |
| 848729 | 26 | 33 | 63 | 92 | 0.30 |
| 848731 | 0 | 15 | 60 | 89 | 0.55 |
| 848732 | 12 | 71 | 67 | 90 | 0.21 |
| 848736 | 6 | 18 | 40 | 73 | 1.00 |
| 848740 | 2 | 18 | 59 | 86 | 0.57 |
| 848748 | 9 | 42 | 60 | 85 | 0.39 |
| 848756 | 3 | 1 | 55 | 85 | 0.72 |
| 848759 | 18 | 37 | 75 | 94 | 0.28 |
| 848761 | 20 | 35 | 68 | 81 | 0.35 |
| 848764 | 0 | 8 | 37 | 64 | 1.52 |
| 848770 | 0 | 4 | 63 | 90 | 0.63 |
| 848771 | 3 | 23 | 57 | 93 | 0.50 |
| 848772 | 15 | 32 | 66 | 82 | 0.40 |
| 848774 | 0 | 8 | 64 | 90 | 0.61 |
| 848790 | 0 | 0 | 33 | 73 | 1.49 |
| 848795 | 9 | 42 | 62 | 91 | 0.35 |
| 848811 | 7 | 5 | 46 | 86 | 0.75 |
| 848814 | 17 | 20 | 64 | 89 | 0.43 |
| 848826 | 7 | 57 | 77 | 93 | 0.24 |
| 848830 | 0 | 35 | 45 | 86 | 0.62 |
| 848832 | 0 | 40 | 71 | 78 | 0.52 |
| 848833 | 19 | 43 | 68 | 81 | 0.32 |
| 848838 | 0 | 36 | 72 | 89 | 0.39 |
| 848841 | 5 | 24 | 62 | 86 | 0.50 |
| 848844 | 0 | 22 | 61 | 89 | 0.53 |
| 848849 | 9 | 48 | 79 | 92 | 0.26 |
| 848850 | 0 | 38 | 68 | 97 | 0.43 |
| 848854 | 2 | 7 | 58 | 84 | 0.66 |
| 848875 | 3 | 17 | 58 | 79 | 0.65 |
| 848890 | 0 | 6 | 27 | 65 | 1.74 |
| 848898 | 7 | 14 | 79 | 87 | 0.43 |
| 848927 | 12 | 25 | 75 | 95 | 0.35 |
| 848928 | 0 | 0 | 45 | 78 | 1.01 |
| 848971 | 0 | 21 | 54 | 82 | 0.65 |
| 848999 | 6 | 29 | 34 | 64 | 1.38 |
| 849007 | 0 | 4 | 41 | 78 | 1.02 |
| 849008 | 0 | 39 | 74 | 90 | 0.42 |
| 849013 | 4 | 17 | 47 | 86 | 0.67 |
| 849016 | 0 | 23 | 56 | 79 | 0.65 |
| 849020 | 0 | 13 | 40 | 67 | 1.28 |
| 849021 | 10 | 34 | 65 | 80 | 0.44 |
| 849030 | 2 | 28 | 58 | 86 | 0.52 |
| 849036 | 2 | 1 | 37 | 76 | 1.16 |
| 849040 | 28 | 55 | 79 | 96 | 0.15 |
| 849044 | 26 | 39 | 72 | 91 | 0.28 |
| 849048 | 0 | 30 | 60 | 79 | 0.61 |
| 849069 | 12 | 12 | 40 | 74 | 1.02 |
| 849071 | 2 | 31 | 65 | 92 | 0.42 |
| 849084 | 0 | 0 | 0 | 43 | >3.00 |
| 849085 | 20 | 39 | 64 | 89 | 0.31 |
| 849086 | 13 | 40 | 69 | 81 | 0.36 |
| 849106 | 20 | 24 | 55 | 80 | 0.53 |
| 849120 | 0 | 15 | 61 | 80 | 0.64 |
| 849123 | 9 | 48 | 82 | 84 | 0.27 |
| 849133 | 0 | 0 | 29 | 70 | 1.62 |
| 849135 | 25 | 54 | 79 | 95 | 0.17 |
| 849162 | 0 | 4 | 35 | 75 | 1.19 |
| 849169 | 34 | 63 | 72 | 83 | 0.12 |
| 849171 | 9 | 60 | 63 | 83 | 0.30 |
| 849177 | 0 | 16 | 69 | 75 | 0.68 |
| 849178 | 0 | 22 | 53 | 83 | 0.65 |
| 849181 | 6 | 8 | 39 | 84 | 0.86 |
| 849189 | 24 | 44 | 81 | 90 | 0.21 |
| 849200 | 0 | 0 | 34 | 70 | 1.48 |
| 849205 | 7 | 29 | 51 | 88 | 0.52 |
| 849216 | 0 | 15 | 28 | 66 | 1.66 |
| 849225 | 23 | 47 | 78 | 94 | 0.21 |
| 849227 | 7 | 35 | 74 | 94 | 0.34 |
| 849233 | 9 | 42 | 68 | 93 | 0.32 |
| 849236 | 0 | 1 | 57 | 88 | 0.73 |
| 849239 | 18 | 38 | 74 | 86 | 0.30 |
| 849266 | 0 | 22 | 66 | 86 | 0.51 |
| 849267 | 18 | 69 | 72 | 94 | 0.17 |
| 849285 | 3 | 18 | 45 | 84 | 0.71 |
| 849288 | 0 | 0 | 0 | 52 | >3.00 |
| 849303 | 18 | 33 | 57 | 72 | 0.54 |
| 849305 | 25 | 28 | 62 | 82 | 0.40 |
| 849309 | 10 | 18 | 59 | 82 | 0.57 |
| 849331 | 0 | 10 | 65 | 93 | 0.57 |
| 849332 | 0 | 0 | 48 | 76 | 1.09 |
| 849345 | 0 | 0 | 62 | 80 | 0.78 |
| 849354 | 0 | 0 | 43 | 64 | 1.49 |
| 849357 | 5 | 21 | 45 | 75 | 0.84 |
| 849358 | 0 | 10 | 45 | 79 | 0.88 |
| 849359 | 3 | 22 | 46 | 88 | 0.62 |
| 849372 | 0 | 15 | 29 | 82 | 1.04 |
| 849383 | 2 | 0 | 33 | 71 | 1.43 |
| 849386 | 11 | 18 | 51 | 84 | 0.60 |

### Study 2

[0344] Cells were plated at a density of 20,000 cells per well and transfected using electroporation with 78.13 nM, 312.5 nM, 1,250 nM, and 5,000 nM concentrations of antisense oligonucleotide, as specified in the Tables below. ISIS 431131, previously disclosed in WO2014179620, was also included in the study as a benchmark oligonucleotide. After a treatment period of approximately 16 hours, RNA was isolated from the cells and PCSK9 mRNA levels were measured by quantitative real-time PCR. Human PCSK9 primer probe set from ABI (ID #Hs03037355_m1) was used to measure mRNA levels. PCSK9 mRNA levels were adjusted according to total RNA content, as measured by RIBOGREEN®. Results are presented as percent inhibition of PCSK9, relative to untreated control cells.

[0345] The half maximal inhibitory concentration (IC₅₀) of each oligonucleotide is also presented. PCSK9 mRNA levels were reduced in a dose-dependent manner in antisense oligonucleotide treated cells. Several of the newly designed antisense oligonucleotides demonstrated superior efficacy compared to the previously disclosed oligonucleotide, ISIS 431131.

TABLE 22

| ISIS | 78.125 | 312.5 | 1,250 | 5,000 | IC₅₀ |
|---|---|---|---|---|---|
| No | nM | nM | nM | nM | (μM) |
| 431131 | 18 | 16 | 30 | 55 | >5 |
| 849169 | 23 | 57 | 86 | 92 | 0.28 |
| 859341 | 24 | 48 | 69 | 85 | 1.54 |
| 859346 | 27 | 54 | 80 | 94 | 0.27 |
| 859358 | 0 | 30 | 69 | 89 | 0.76 |
| 859361 | 28 | 53 | 73 | 94 | 0.30 |
| 859363 | 38 | 50 | 79 | 82 | 0.20 |
| 859384 | 19 | 59 | 76 | 94 | 0.30 |
| 859387 | 36 | 66 | 79 | 96 | 0.16 |
| 859392 | 14 | 33 | 63 | 81 | 0.96 |
| 859393 | 20 | 59 | 90 | 96 | 0.27 |
| 859394 | 43 | 65 | 80 | 96 | 0.12 |
| 859395 | 37 | 51 | 82 | 91 | 0.21 |
| 859401 | 27 | 64 | 88 | 94 | 0.20 |
| 859408 | 0 | 59 | 61 | 92 | 0.55 |
| 859419 | 22 | 58 | 77 | 84 | 0.31 |
| 859459 | 33 | 55 | 91 | 93 | 0.19 |
| 859462 | 31 | 56 | 78 | 96 | 0.24 |
| 859469 | 26 | 48 | 76 | 83 | 0.36 |
| 859472 | 19 | 35 | 67 | 87 | 0.56 |
| 859504 | 19 | 47 | 59 | 80 | 0.57 |
| 859529 | 19 | 50 | 88 | 94 | 0.32 |
| 859531 | 33 | 52 | 76 | 69 | 0.29 |
| 859532 | 24 | 55 | 79 | 90 | 0.30 |
| 859533 | 9 | 40 | 77 | 91 | 0.51 |
| 859534 | 25 | 49 | 85 | 85 | 0.70 |
| 859551 | 25 | 41 | 51 | 78 | 0.69 |
| 859552 | 0 | 17 | 53 | 78 | 1.36 |
| 859553 | 24 | 45 | 79 | 94 | 0.35 |
| 859561 | 28 | 54 | 71 | 92 | 0.30 |
| 859571 | 35 | 34 | 76 | 73 | 0.43 |
| 859584 | 19 | 51 | 85 | 95 | 0.32 |
| 859598 | 33 | 55 | 73 | 83 | 0.25 |
| 859601 | 23 | 39 | 63 | 90 | 0.50 |
| 859603 | 0 | 6 | 70 | 71 | 1.25 |
| 859605 | 9 | 42 | 67 | 83 | 0.62 |
| 859611 | 21 | 22 | 47 | 76 | 1.16 |

### Example 3: Tolerability of 3′-Conjugated 3-10-3 cEt Gapmers Targeting Human PCSK9 in BALB/c Mice

[0346] ISIS oligonucleotides selected from the studies above were conjugated with 3′-THA-C6-GalNAc3-(3R,5S)-5-(hydroxymethyl) pyrrolidin-3-ol phosphate endcap (henceforth referred to as 3′-THA). The hundred and sixty two 3′-THA-conjugated ISIS antisense oligonucleotides evaluated for changes in the levels of plasma chemistry markers are presented in the Table below. ‘Parent Oligo’ indicates the ISIS oligonucleotide that has been described in the studies above and that was conjugated with 3′-THA and tested in this study.

TABLE 23
3′-conjugated 3-10-3 cEt gapmers selected for
tolerability evaluation in BALB/c mice

| ISIS | Parent | SEQ ID |
|---|---|---|
| No | Oligo | NO |
| 863413 | 466847 | 1096 |
| 863415 | 848219 | 1390 |
| 863416 | 848241 | 777 |
| 863418 | 848306 | 1236 |
| 863419 | 848323 | 1419 |
| 863421 | 848430 | 1357 |
| 863422 | 848431 | 1435 |
| 863423 | 848500 | 905 |
| 863424 | 848539 | 1297 |
| 863425 | 848542 | 1528 |
| 863426 | 848560 | 607 |
| 863427 | 848567 | 1145 |
| 863428 | 848570 | 451 |
| 863429 | 848572 | 1375 |
| 863433 | 848583 | 1223 |
| 863434 | 848584 | 377 |
| 863435 | 848585 | 452 |
| 863436 | 848593 | 763 |
| 863437 | 848596 | 994 |
| 863438 | 848597 | 1071 |
| 863439 | 848598 | 1147 |
| 863440 | 848616 | 379 |
| 863441 | 848618 | 1302 |
| 863442 | 848619 | 1378 |
| 863443 | 848629 | 1073 |
| 863444 | 848630 | 1149 |
| 863445 | 848632 | 455 |
| 863446 | 848635 | 1457 |
| 863447 | 848636 | 1534 |
| 863448 | 848649 | 1380 |
| 863449 | 848651 | 1535 |
| 863451 | 848656 | 844 |
| 863452 | 848670 | 691 |
| 863453 | 848671 | 768 |
| 863457 | 848679 | 458 |
| 863458 | 848680 | 1306 |
| 863464 | 848693 | 384 |
| 863465 | 848694 | 459 |
| 863468 | 848725 | 386 |
| 863472 | 848736 | 926 |
| 863473 | 848740 | 1233 |
| 863474 | 848748 | 619 |
| 863475 | 848756 | 388 |
| 863476 | 848759 | 1387 |
| 863477 | 848761 | 1542 |
| 863478 | 848764 | 697 |
| 863479 | 848770 | 1158 |
| 863480 | 848771 | 1235 |
| 863481 | 848772 | 389 |
| 863482 | 848774 | 1312 |
| 863483 | 848790 | 1240 |
| 863484 | 848795 | 549 |
| 863485 | 848811 | 550 |
| 863486 | 848814 | 781 |
| 863487 | 848826 | 474 |
| 863488 | 848830 | 782 |
| 863489 | 848832 | 939 |
| 863490 | 848833 | 1016 |
| 863491 | 848838 | 1243 |
| 863492 | 848841 | 1474 |
| 863493 | 848844 | 629 |
| 863494 | 848849 | 1017 |
| 863495 | 848850 | 1092 |
| 863496 | 848854 | 1244 |
| 863497 | 848875 | 554 |
| 863498 | 848890 | 478 |
| 863499 | 848898 | 1094 |
| 863500 | 848927 | 871 |
| 863501 | 848928 | 947 |
| 863502 | 848971 | 563 |
| 863503 | 848999 | 1332 |
| 863504 | 849007 | 877 |
| 863505 | 849008 | 953 |
| 863506 | 849013 | 410 |
| 863507 | 849016 | 1411 |
| 863508 | 849020 | 644 |
| 863509 | 849021 | 721 |
| 863510 | 849030 | 1258 |
| 863511 | 849036 | 645 |
| 863512 | 849040 | 955 |
| 863513 | 849044 | 337 |
| 863514 | 849048 | 1413 |
| 863515 | 849069 | 724 |
| 863516 | 849071 | 881 |
| 863517 | 849084 | 648 |
| 863518 | 849085 | 725 |
| 863519 | 849086 | 802 |
| 863520 | 849106 | 1111 |
| 863521 | 849120 | 960 |
| 863522 | 849123 | 1188 |
| 863523 | 849133 | 728 |
| 863524 | 849135 | 885 |
| 863525 | 849162 | 504 |
| 863526 | 849169 | 1043 |
| 863527 | 849171 | 1195 |
| 863531 | 849189 | 426 |
| 863532 | 849200 | 968 |
| 863533 | 849205 | 427 |
| 863535 | 849225 | 1507 |
| 863536 | 849227 | 585 |
| 863537 | 849233 | 1047 |
| 863538 | 849236 | 353 |
| 863539 | 849239 | 1352 |
| 863540 | 849266 | 1126 |
| 863541 | 849267 | 1203 |
| 863542 | 849285 | 434 |
| 863543 | 849288 | 1436 |
| 863544 | 849303 | 1362 |
| 863545 | 849305 | 1516 |
| 863546 | 849309 | 749 |
| 863547 | 849331 | 1213 |
| 863548 | 849332 | 367 |
| 863549 | 849345 | 1061 |
| 863550 | 849354 | 523 |
| 863551 | 849357 | 754 |
| 863552 | 849358 | 831 |
| 863553 | 849359 | 908 |
| 863554 | 849372 | 678 |
| 863555 | 849383 | 1369 |
| 863556 | 849386 | 526 |
| 884269 | 859561 | 55 |
| 884270 | 859459 | 180 |
| 884271 | 859395 | 164 |
| 884272 | 859603 | 218 |
| 884273 | 859504 | 284 |
| 884274 | 859394 | 87 |
| 884275 | 859598 | 141 |
| 884276 | 859531 | 198 |
| 884277 | 859469 | 28 |
| 884278 | 859346 | 152 |
| 884279 | 859361 | 79 |
| 884280 | 859472 | 276 |

[0347] BALB/c mice are a multipurpose mice model, frequently utilized for safety and efficacy testing. The mice were administered a single dose of oligonucleotide. Plasma levels of transaminases were measured using an automated clinical chemistry analyzer (Hitachi Olympus AU400e, Melville, NY). ISIS oligonucleotides that caused changes in the levels of ALT and/or AST outside the expected range for antisense oligonucleotides were excluded in further studies. ISIS 863413, ISIS 863419, ISIS 863424, ISIS 863425, ISIS 863427, ISIS 863433, ISIS 863434, ISIS 863436, ISIS 863437, ISIS 863438, ISIS 863439, ISIS 863441, ISIS 863444, ISIS 863445, ISIS 863448, ISIS 863452, ISIS 863472, ISIS 863473, ISIS 863474, ISIS 863475, ISIS 863477, ISIS 863479, ISIS 863480, ISIS 863481, ISIS 863482, ISIS 863483, ISIS 863484, ISIS 863485, ISIS 863486, ISIS 863489, ISIS 863490, ISIS 863491, ISIS 863493, ISIS 863494, ISIS 863495, ISIS 863496, ISIS 863497, ISIS 863498, ISIS 863499, ISIS 863502, ISIS 863506, ISIS 863507, ISIS 863509, ISIS 863510, ISIS 863511, ISIS 863512, ISIS 863514, ISIS 863516, ISIS 863517, ISIS 863518, ISIS 863520, ISIS 863522, ISIS 863524, ISIS 863525, ISIS 863526, ISIS 863527, ISIS 863531, ISIS 863533, ISIS 863536, ISIS 863537, ISIS 863538, ISIS 863539, ISIS 863541, ISIS 863545, ISIS 863547, ISIS 863548, ISIS 863549, ISIS 863550, ISIS 863552, and ISIS 863553 were considered tolerable in this study and were selected for further evaluation.

### Example 4: Effect of Antisense Inhibition of PCSK9 in Transgenic Mouse Model

[0348] A transgenic mouse model was developed at UCI using the human PCSK9 genomic construct, which was contained in fosmid ABC7-611722G24 and restricted with NheI to produce a DNA fragment containing the entire genomic sequence as well as 8 Kb of 5′ and 0.4 Kb of 3′ noncoding sequence. PCSK9 transgenic mice were produced by random insertion via micronucleus injection. Progeny expressed human PCSK9 mRNA in the liver and secreted human PCSK9 plasma protein.

[0349] The efficacy of 3′-THA-conjugated ISIS oligonucleotides was evaluated in this model (referred to herein as Tg mice). The ISIS oligonucleotides tested are presented in the Table below. ‘Parent ISIS No’ indicates the ISIS oligonucleotide that has been described in the studies above and that was conjugated with 3′-THA and tested in this study.

TABLE 24
ISIS oligonucleotides tested in Tg mice

| | | Parent | SEQ |
|---|---|---|---|
| ISIS No | Sequence | ISIS No | ID NO |
| 863413 | GAGGTATCCCCGGCGG | 466847 | 1096 |
| 863419 | GTCTAGGAGATACACC | 848323 | 1419 |
| 863424 | CATTTTAAAGCTCAGC | 848539 | 1297 |
| 863425 | GACAAGTCGGAACCAT | 848542 | 1528 |
| 863427 | TTGAATGGTGAAATGC | 848567 | 1145 |
| 863433 | GGACATCGGCACATTG | 848583 | 1223 |
| 863434 | ACGGACATCGGCACAT | 848584 | 377 |
| 863436 | AGCTCAATAAAAGTCA | 848593 | 763 |
| 863437 | CGGAACAAGAGCTCAA | 848596 | 994 |
| 863438 | ACGGAACAAGAGCTCA | 848597 | 1071 |
| 863439 | CACGGAACAAGAGCTC | 848598 | 1147 |
| 863441 | GATGAGGGCCATCAGC | 848618 | 1302 |
| 863444 | CAGAAAGCTAAGCCTC | 848630 | 1149 |
| 863445 | CTAGATGCCATCCAGA | 848632 | 455 |
| 863448 | TCCTAGGTGATGGCTC | 848649 | 1380 |
| 863452 | GCGAATGTGTACCCTG | 848670 | 691 |
| 863472 | GGAAAAAGTTCCATGC | 848736 | 926 |
| 863473 | GTGATAACGGAAAAAG | 848740 | 1233 |
| 863474 | TGCCTTAGAAGCATCT | 848748 | 619 |
| 863475 | AAAGATAAATGTCTGC | 848756 | 388 |
| 863477 | GGCAACAGAGAGGACA | 848761 | 1542 |
| 863479 | AGCAAAACAGGTCTAG | 848770 | 1158 |
| 863480 | TTCAAGTTACAAAAGC | 848771 | 1235 |
| 863481 | CCCAGAATAAATATCT | 848772 | 389 |
| 863482 | TGCTACAAAACCCAGA | 848774 | 1312 |
| 863483 | CCAAATCGGAACCCAC | 848790 | 1240 |
| 863484 | CGAGAATACCTCCGCC | 848795 | 549 |
| 863485 | GCTGAGTAAGGACTTG | 848811 | 550 |
| 863486 | AGAAAGTCAAAGGCTC | 848814 | 781 |
| 863489 | TACATTTCAGACGGTG | 848832 | 939 |
| 863490 | AATAATCTCATGTCAG | 848833 | 1016 |
| 863491 | AGGCAGTAATGGGCAA | 848838 | 1243 |
| 863493 | TCATGAATCAAGTCCA | 848844 | 629 |
| 863494 | CAAATTATAGCAGCCA | 848849 | 1017 |
| 863495 | AACAAATTATAGCAGC | 848850 | 1092 |
| 863496 | TCCAACACTGAGGACC | 848854 | 1244 |
| 863497 | CTACAAATGCAGGCAG | 848875 | 554 |
| 863498 | CTCGACAACAGGTTTT | 848890 | 478 |
| 863499 | ACCAAATGCGGACCAA | 848898 | 1094 |
| 863502 | GCAATTCGGTTTGTCC | 848971 | 563 |
| 863506 | GGAAAGGAACAGGCTC | 849013 | 410 |
| 863507 | CTCCACTGAAGAGGTC | 849016 | 1411 |
| 863509 | GACAATGAAGAGGAGA | 849021 | 721 |
| 863510 | GTTAAGAGTGCAGGGT | 849030 | 1258 |
| 863511 | ACAGAGAAATGCATGC | 849036 | 645 |
| 863512 | GTTATTATTGAATGGT | 849040 | 955 |
| 863514 | GTTAATAATGCCCCCG | 849048 | 1413 |
| 863516 | ACAACTGGATACATTG | 849071 | 881 |
| 863517 | CAATAGGCATCTACCA | 849084 | 648 |
| 863518 | ACTCATCAATAGGCAT | 849085 | 725 |
| 863520 | CCTCAGGTGGAATCAG | 849106 | 1111 |
| 863522 | GGAGAATAACAGTGAT | 849123 | 1188 |
| 863524 | ATAGACAAGGAAAGGG | 849135 | 885 |
| 863525 | GTCTAGAAAAAGTCCT | 849162 | 504 |
| 863526 | AGGAAAGTCTCAGGGC | 849169 | 1043 |
| 863527 | CTGTAGGAAAGTCTCA | 849171 | 1195 |
| 863531 | ACAGCTGCTAGTTATT | 849189 | 426 |
| 863533 | TGCTACTGTCAACAGT | 849205 | 427 |
| 863536 | GGAAGATATTAGCAAT | 849227 | 585 |
| 863537 | GCGGATTTCAGACTTG | 849233 | 1047 |
| 863538 | CAACATCAAATTCTGC | 849236 | 353 |
| 863539 | GAAGACGGAGTAAGGC | 849239 | 1352 |
| 863541 | TTCTAAGTGCCACGGG | 849267 | 1203 |
| 863545 | CTATCCTGTAGCATCA | 849305 | 1516 |
| 863547 | GGAGAAGTAAGGTCAC | 849331 | 1213 |
| 863548 | AGGAGAAGTAAGGTCA | 849332 | 367 |
| 863549 | ATTTTAAAGCAACGGG | 849345 | 1061 |
| 863550 | CCTACATGCCAGCCTG | 849354 | 523 |
| 863552 | TCTGAACATGGTAGGG | 849358 | 831 |
| 863553 | GTAAGATGGAAAGAGA | 849359 | 908 |

### Treatment

[0350] PCSK9 transgenic mice were maintained on a 12-hour light/dark cycle and were fed ad libitum normal Purina mouse chow. Animals were acclimated for at least 7 days in the research facility before initiation of the experiment. Antisense oligonucleotides (ASOs) were prepared in buffered saline (PBS) and sterilized by filtering through a 0.2 micron filter. Oligonucleotides were dissolved in 0.9% PBS for injection.

[0351] The PCSK9 transgenic mice received subcutaneous injections of ISIS oligonucleotide at a dose of 2.5 mg/kg twice per week for 2 weeks. Two groups of mice received subcutaneous injections of PBS for 2 weeks. The saline-injected groups served as the control group to which oligonucleotide-treated groups were compared.

### Plasma Chemistry Markers

[0352] To evaluate the effect of ISIS oligonucleotides on liver and kidney function of these mice, plasma levels of transaminases (ALT and AST), cholesterol (CHOL), HDL cholesterol (HDL), LDL cholesterol (LDL), and triglycerides (TRIG) were measured on day 12 using an automated clinical chemistry analyzer (Hitachi Olympus AU400e, Melville, NY). The results are presented in the Table below. ISIS oligonucleotides that caused changes in the levels of any of the liver or kidney function markers outside the expected range for antisense oligonucleotides were excluded in further studies.

TABLE 25
Plasma chemistry markers in Tg mice plasma

| | ALT | AST | CHOL | HDL | LDL | TRIG |
|---|---|---|---|---|---|---|
| Treatment | (IU/L) | (IU/L) | (mg/dL) | (mg/dL) | (mg/dL) | (mg/dL) |
| PBS | 17 | 37 | 114 | 73 | 35 | 65 |
| PBS | 23 | 102 | 105 | 68 | 32 | 76 |
| 863413 | 19 | 72 | 122 | 88 | 24 | 89 |
| 863419 | 15 | 44 | 115 | 73 | 31 | 104 |
| 863424 | 18 | 34 | 197 | 112 | 79 | 105 |
| 863425 | 25 | 53 | 143 | 101 | 36 | 104 |
| 863427 | 22 | 96 | 113 | 75 | 28 | 127 |
| 863433 | 17 | 54 | 92 | 67 | 19 | 61 |
| 863434 | 24 | 36 | 132 | 98 | 35 | 102 |
| 863436 | 17 | 50 | 124 | 81 | 31 | 96 |
| 863437 | 21 | 69 | 126 | 91 | 30 | 81 |
| 863438 | 18 | 66 | 57 | 39 | 15 | 54 |
| 863439 | 42 | 173 | 111 | 78 | 22 | 107 |
| 863441 | 20 | 57 | 84 | 58 | 20 | 56 |
| 863444 | 19 | 41 | 149 | 101 | 42 | 116 |
| 863445 | 20 | 36 | 169 | 111 | 48 | 111 |
| 863448 | 24 | 44 | 107 | 69 | 29 | 79 |
| 863452 | 20 | 67 | 114 | 78 | 23 | 100 |
| 863472 | 35 | 55 | 105 | 71 | 26 | 89 |
| 863473 | 23 | 67 | 152 | 105 | 38 | 130 |
| 863474 | 21 | 115 | 118 | 78 | 32 | 45 |
| 863475 | 23 | 87 | 179 | 112 | 62 | 92 |
| 863477 | 67 | 142 | 222 | 137 | 73 | 69 |
| 863479 | 29 | 60 | 142 | 96 | 32 | 90 |
| 863480 | 19 | 52 | 122 | 88 | 25 | 53 |
| 863481 | 28 | 50 | 223 | 132 | 70 | 115 |
| 863482 | 20 | 43 | 168 | 105 5 | 46 | 129 |
| 863483 | 19 | 34 | 174 | 110 | 47 | 139 |
| 863484 | 25 | 71 | 64 | 38 | 21 | 66 |
| 863485 | 19 | 71 | 170 | 113 | 42 | 110 |
| 863486 | 18 | 40 | 117 | 78 | 28 | 121 |
| 863489 | 38 | 68 | 90 | 66 | 18 | 89 |
| 863490 | 19 | 41 | 99 | 71 | 19 | 113 |
| 863491 | 20 | 40 | 148 | 99 | 35 | 146 |
| 863493 | 18 | 74 | 107 | 73 | 26 | 59 |
| 863494 | 19 | 41 | 149 | 106 | 32 | 104 |
| 863495 | 17 | 34 | 136 | 95 | 32 | 116 |
| 863496 | 545 | 275 | 136 | 97 | 31 | 29 |
| 863497 | 36 | 49 | 121 | 84 | 28 | 53 |
| 863498 | 23 | 44 | 181 | 122 | 42 | 98 |
| 863499 | 21 | 51 | 128 | 102 | 18 | 58 |
| 863502 | 34 | 144 | 116 | 84 | 22 | 86 |
| 863506 | 30 | 44 | 188 | 119 | 51 | 108 |
| 863507 | 19 | 46 | 108 | 78 | 18 | 100 |
| 863509 | 23 | 63 | 121 | 80 | 28 | 115 |
| 863510 | 40 | 71 | 149 | 111 | 28 | 51 |
| 863511 | 31 | 61 | 101 | 70 | 23 | 83 |
| 863512 | 21 | 52 | 83 | 59 | 14 | 103 |
| 863514 | 22 | 65 | 99 | 69 | 23 | 64 |
| 863516 | 18 | 52 | 117 | 73 | 33 | 122 |
| 863517 | 25 | 98 | 113 | 74 | 27 | 125 |
| 863518 | 35 | 116 | 96 | 65 | 23 | 70 |
| 863520 | 21 | 102 | 107 | 68 | 31 | 76 |
| 863522 | 31 | 55 | 89 | 56 | 24 | 77 |
| 863524 | 49 | 61 | 154 | 104 | 43 | 94 |
| 863525 | 20 | 58 | 208 | 116 | 66 | 155 |
| 863526 | 32 | 82 | 159 | 114 | 37 | 59 |
| 863527 | 25 | 112 | 98 | 66 | 23 | 101 |
| 863531 | 835 | 454 | 268 | 149 | 67 | 84 |
| 863533 | 0 | 109 | 276 | 152 | 80 | 98 |
| 863536 | 22 | 68 | 120 | 75 | 28 | 181 |
| 863537 | 29 | 102 | 134 | 97 | 27 | 52 |
| 863538 | 16 | 42 | 126 | 76 | 39 | 89 |
| 863539 | 22 | 53 | 100 | 65 | 25 | 64 |
| 863541 | 19 | 41 | 98 | 66 | 23 | 115 |
| 863545 | 28 | 53 | 109 | 73 | 25 | 114 |
| 863547 | 22 | 41 | 119 | 80 | 30 | 71 |
| 863548 | 550 | 433 | 188 | 125 | 33 | 60 |
| 863549 | 17 | 36 | 109 | 70 | 33 | 72 |
| 863550 | 32 | 62 | 158 | 98 | 43 | 77 |
| 863552 | 18 | 55 | 113 | 71 | 33 | 79 |
| 863553 | 18 | 43 | 103 | 62 | 30 | 86 |

### Example 5: Tolerability of ISIS Oligonucleotides Targeting Human PCSK9 in CD1 Mice

[0353] ISIS oligonucleotides selected from the studies above were conjugated with 5′-Trishexylamino-(THA)-C6GalNAC3 endcap (henceforth referred to as 5′-THA). CD1® mice (Charles River, MA) are a multipurpose mice model, frequently utilized for safety and efficacy testing. The mice were treated with ISIS antisense oligonucleotides, selected from studies described above and conjugated with 5′-THA, and evaluated for changes in the levels of various plasma chemistry markers.

### Study 1

### Treatment

[0354] Groups of male CD1 mice were injected subcutaneously once a week for 6 weeks with 15 mg/kg of ISIS oligonucleotides. One group of male CD1 mice was injected subcutaneously once a week for 6 weeks with PBS. Mice were euthanized 48 hours after the last dose, and organs and plasma were harvested for further analysis.

[0355] The ISIS oligonucleotides tested are presented in the Table below. ‘Unconjugated parent ISIS No.’ refers to the ISIS oligonucleotide described in the in vitro studies above with the same sequence. ‘3′-THA counterpart ISIS No.’ refers to the 3′THA conjugated oligonucleotide with the same sequence and evaluated in the transgenic mice study above.

TABLE 26
ISIS oligonucleotides tested in CD1
mice tolerability study

| | Uncon- | | | |
|---|---|---|---|---|
| | jugated | 3′-THA | | |
| ISIS | parent | counterpart | | SEQ |
| No. | ISIS No. | ISIS No | Sequence | ID NO |
| 863576 | 848583 | 863433 | GGACATCGGCACATTG | 1223 |
| 863633 | 848833 | 863490 | AATAATCTCATGTCAG | 1016 |
| 863655 | 849040 | 863512 | GTTATTATTGAATGGT | 955 |
| 863670 | 849171 | 863527 | CTGTAGGAAAGTCTCA | 1195 |
| 863681 | 849236 | 863538 | CAACATCAAATTCTGC | 353 |

### Plasma Chemistry Markers

[0356] To evaluate the effect of ISIS oligonucleotides on liver and kidney function, plasma levels of transaminases, bilirubin, creatinine, and BUN were measured using an automated clinical chemistry analyzer (Hitachi Olympus AU400e, Melville, NY). The results are presented in the Table below. Treatment with the ISIS oligonucleotides did not cause any changes in the levels of any of the liver or kidney function markers outside the expected range for antisense oligonucleotides.

TABLE 27
Plasma chemistry markers in CD1 mice plasma at Day 45

| | ALT | AST | ALB | BUN | CRE | TBIL |
|---|---|---|---|---|---|---|
| | (IU/L) | (IU/L) | (g/dL) | (mg/dL) | (mg/dL) | (mg/dL) |
| PBS | 25 | 41 | 2.6 | 20.1 | 0.07 | 0.13 |
| ISIS 863576 | 125 | 134 | 2.8 | 24.5 | 0.10 | 0.14 |
| ISIS 863633 | 35 | 60 | 2.6 | 21.8 | 0.10 | 0.14 |
| ISIS 863655 | 77 | 84 | 2.4 | 20.0 | 0.06 | 0.13 |
| ISIS 863670 | 25 | 61 | 2.7 | 22.5 | 0.09 | 0.15 |
| ISIS 863681 | 27 | 47 | 2.8 | 26.5 | 0.12 | 0.14 |

### Hematology Assays

[0357] Blood obtained from all mice groups were analyzed for RBC, WBC, platelets, neutrophils, lymphocytes, and monocyte counts, as well as hemoglobin, HCT and MCV levels. The results are presented in the Table below. Treatment with the ISIS oligonucleotides did not cause any changes in the levels of any of the hematology markers outside the expected range for antisense oligonucleotides.

TABLE 28
Blood cell count in CD1 mice at Day 45

| | RBC | Platelets | WBC | Neutro- | Lympho- | Mono- |
|---|---|---|---|---|---|---|
| | (×10⁶/ | (×10³/ | (×10³/ | phils | cytes | cytes |
| | μL) | μL) | μL) | (×10³/μL) | (×10³/μL) | (×10³/μL) |
| PBS | 9.0 | 1288 | 11.3 | 12.6 | 9128 | 515 |
| 863576 | 8.3 | 1251 | 9.4 | 18.8 | 6643 | 316 |
| 863633 | 9.4 | 1338 | 10.1 | 13.5 | 8009 | 698 |
| 863655 | 8.9 | 1320 | 8.0 | 10.0 | 5919 | 473 |
| 863670 | 9.7 | 1335 | 8.3 | 21.3 | 6514 | 402 |
| 863681 | 9.5 | 1329 | 7.6 | 11.0 | 6376 | 310 |

TABLE 29
Hematology markers in CD1 mice at Day 45

| | Hemoglobin | HCT | MCV |
|---|---|---|---|
| | (g/dL) | (%) | (fL) |
| PBS | 14.0 | 43 | 48 |
| 863576 | 12.9 | 40 | 48 |
| 863633 | 14.6 | 45 | 49 |
| 863655 | 14.1 | 44 | 50 |
| 863670 | 14.7 | 44 | 46 |
| 863681 | 14.6 | 45 | 47 |

### Body and Organ Weight Measurements

[0358] To evaluate the effect of ISIS oligonucleotides on the overall health of the animals, body and organ weights were measured. Body weights were measured every week and are presented in the Table below. Organ weights were measured and the data is also presented in the Table below. The results indicate that effect of treatment with antisense oligonucleotides on body and organ weights was within the expected range for antisense oligonucleotides.

TABLE 30
Body weights (g) in CD1 mice

| | | Week | Week | Week | Week | Week | Week |
|---|---|---|---|---|---|---|---|
| | Baseline | 1 | 2 | 3 | 4 | 5 | 6 |
| | (day 1) | (day 8) | (day 15) | (day 22) | (day 29) | (day 36) | (day 43) |
| PBS | 46 | 48 | 49 | 48 | 50 | 49 | 49 |
| 863576 | 29 | 33 | 35 | 36 | 38 | 38 | 39 |
| 863633 | 27 | 32 | 33 | 34 | 36 | 37 | 39 |
| 863655 | 28 | 33 | 33 | 35 | 37 | 38 | 39 |
| 863670 | 27 | 31 | 32 | 33 | 36 | 36 | 38 |
| 863681 | 28 | 33 | 33 | 35 | 37 | 38 | 40 |

TABLE 31
Organ weights (g) in CD1 mice

| | Liver | Spleen | Kidney |
|---|---|---|---|
| PBS | 2.25 | 0.16 | 0.63 |
| 863576 | 2.32 | 0.19 | 0.59 |
| 863633 | 2.25 | 0.11 | 0.50 |
| 863655 | 2.55 | 0.15 | 0.61 |
| 863670 | 1.89 | 0.11 | 0.51 |
| 863681 | 2.25 | 0.10 | 0.47 |

### Study 2

### Treatment

[0359] Groups of male CD1 mice were injected subcutaneously once a week for 6 weeks with 15 mg/kg of ISIS oligonucleotides. One group of male CD1 mice was injected subcutaneously once a week for 6 weeks with PBS. Mice were euthanized 48 hours after the last dose, and organs and plasma were harvested for further analysis.

[0360] The ISIS oligonucleotides tested are presented in the Table below. ‘Unconjugated parent ISIS No.’ refers to the ISIS oligonucleotide described in the in vitro studies above with the same sequence. ‘3′-THA counterpart ISIS No.’ refers to the 3′THA conjugated oligonucleotide with the same sequence and described in the transgenic mice study above.

TABLE 32
ISIS oligonucleotides tested in CD1
mice tolerability study

| | Uncon- | | | |
|---|---|---|---|---|
| | jugated | 3′-THA | | |
| ISIS | parent | counterpart | | SEQ |
| No. | ISIS No. | ISIS No | Sequence | ID NO |
| 863568 | 848542 | 863425 | GACAAGTCGGAACCAT | 1528 |
| 863581 | 848597 | 863438 | ACGGAACAAGAGCTCA | 1071 |
| 863582 | 848598 | 863439 | CACGGAACAAGAGCTC | 1147 |
| 863587 | 848630 | 863444 | CAGAAAGCTAAGCCTC | 1149 |

### Plasma Chemistry Markers

[0361] To evaluate the effect of ISIS oligonucleotides on liver and kidney function, plasma levels of transaminases, bilirubin, creatinine, and BUN were measured using an automated clinical chemistry analyzer (Hitachi Olympus AU400e, Melville, NY).

[0362] The results are presented in the Table below. Treatment with the ISIS oligonucleotides did not cause any changes in the levels of any of the liver or kidney function markers outside the expected range for antisense oligonucleotides.

TABLE 33
Plasma chemistry markers in CD1 mice plasma at Day 45

| | ALT | AST | ALB | BUN | CRE | TBIL |
|---|---|---|---|---|---|---|
| | (IU/L) | (IU/L) | (g/dL) | (mg/dL) | (mg/dL) | (mg/dL) |
| PBS | 25 | 51 | 2.6 | 25.8 | 0.10 | 0.12 |
| ISIS 863568 | 72 | 67 | 2.6 | 20.4 | 0.10 | 0.14 |
| ISIS 863581 | 74 | 77 | 2.7 | 25.0 | 0.10 | 0.14 |
| ISIS 863582 | 71 | 89 | 2.8 | 24.4 | 0.11 | 0.13 |
| ISIS 863587 | 60 | 60 | 2.5 | 24.6 | 0.11 | 0.10 |

### Hematology Assays

[0363] Blood obtained from all mice groups were analyzed for RBC, WBC, platelets, neutrophils, lymphocytes, and monocyte counts, as well as hemoglobin, HCT and MCV levels. The results are presented in the Table below. Treatment with the ISIS oligonucleotides did not cause any changes in the levels of any of the hematology markers outside the expected range for antisense oligonucleotides.

TABLE 34
Blood cell count in CD1 mice at Day 45

| | RBC | Platelets | WBC | Neutro- | Lympho- | Mono- |
|---|---|---|---|---|---|---|
| | (×10⁶/ | (×10³/ | (×10³/ | phils | cytes | cytes |
| | μL) | μL) | μL) | (×10³/μL) | (×10³/μL) | (×10³/μL) |
| PBS | 9.6 | 853 | 3.9 | 12 | 3174 | 129 |
| 863568 | 10.3 | 859 | 7.8 | 15 | 6060 | 347 |
| 863581 | 9.4 | 812 | 8.0 | 17 | 6162 | 359 |
| 863582 | 9.1 | 868 | 10.5 | 21 | 6671 | 713 |
| 863587 | 9.6 | 903 | 9.8 | 10 | 8233 | 344 |

TABLE 35
Hematology markers in CD1 mice at Day 45

| | Hemoglobin | HCT | MCV |
|---|---|---|---|
| | (g/dL) | (%) | (fL) |
| PBS | 14.5 | 44 | 46 |
| 863568 | 16.2 | 47 | 46 |
| 863581 | 14.5 | 43 | 46 |
| 863582 | 13.5 | 41 | 45 |
| 863587 | 15.0 | 45 | 47 |

### Body and Organ Weight Measurements

[0364] To evaluate the effect of ISIS oligonucleotides on the overall health of the animals, body and organ weights were measured. Body weights were measured every week and are presented in the Table below. Organ weights were measured and the data is also presented in the Table below. The results indicate that effect of treatment with antisense oligonucleotides on body and organ weights was within the expected range for antisense oligonucleotides.

TABLE 37
Organ weights (g) in CD1 mice

| | Liver | Spleen | Kidney |
|---|---|---|---|
| PBS | 2.06 | 0.11 | 0.59 |
| 863568 | 2.46 | 0.10 | 0.54 |
| 863581 | 2.23 | 0.13 | 0.56 |
| 863582 | 2.52 | 0.16 | 0.63 |
| 863587 | 2.94 | 0.16 | 0.64 |

TABLE 36
Body weights (g) in CD1 mice

| | | Week | Week | Week | Week | Week | Week |
|---|---|---|---|---|---|---|---|
| | Baseline | 1 | 2 | 3 | 4 | 5 | 6 |
| | (day 1) | (day 9) | (day 16) | (day 23) | (day 30) | (day 37) | (day 43) |
| PBS | 30 | 33 | 36 | 36 | 37 | 39 | 39 |
| 863568 | 29 | 32 | 34 | 34 | 36 | 39 | 38 |
| 863581 | 29 | 33 | 35 | 36 | 36 | 39 | 39 |
| 863582 | 31 | 34 | 36 | 36 | 37 | 40 | 41 |
| 863587 | 30 | 35 | 37 | 37 | 39 | 41 | 43 |

### Study 3

### Treatment

[0365] Groups of male CD1 mice were injected subcutaneously once a week for 6 weeks with 5 mg/kg or 15 mg/kg of ISIS oligonucleotides. One group of male CD1 mice was injected subcutaneously once a week for 6 weeks with PBS. Mice were euthanized 48 hours after the last dose, and organs and plasma were harvested for further analysis.

[0366] The ISIS oligonucleotides tested are presented in the Table below. ‘Unconjugated parent ISIS No.’ refers to the ISIS oligonucleotide described in the in vitro studies above with the same sequence. ‘3′-THA counterpart ISIS No.’ refers to the 3′THA conjugated oligonucleotide with the same sequence and described in the transgenic mice study above.

TABLE 38
ISIS oligonucleotides tested in CD1
mice tolerability study

| | Uncon- | | | |
|---|---|---|---|---|
| | jugated | 3′-THA | | |
| ISIS | parent | counterpart | | SEQ |
| No. | ISIS No. | ISIS No | Sequence | ID NO |
| 845219 | 466847 | 863413 | GAGGTATCCCCGGCGG | 1096 |
| 863577 | 848584 | 863434 | ACGGACATCGGCACAT | 377 |
| 863579 | 848593 | 863436 | AGCTCAATAAAAGTCA | 763 |
| 863637 | 848849 | 863494 | CAAATTATAGCAGCCA | 1017 |
| 863682 | 849239 | 863539 | GAAGACGGAGTAAGGC | 1352 |

### Plasma Chemistry Markers

[0367] To evaluate the effect of ISIS oligonucleotides on liver and kidney function, plasma levels of transaminases, bilirubin, creatinine, and BUN were measured using an automated clinical chemistry analyzer (Hitachi Olympus AU400e, Melville, NY).

[0368] The results are presented in the Table below. ISIS oligonucleotides that caused changes in the levels of any of the liver or kidney function markers outside the expected range for antisense oligonucleotides were excluded in further studies.

TABLE 39
Plasma chemistry markers in CD1 mice plasma at Day 45

| | | | | | | CRE | TBIL |
|---|---|---|---|---|---|---|---|
| | Dose | ALT | AST | ALB | BUN | (mg/ | (mg/ |
| | (mg/kg) | (IU/L) | (IU/L) | (g/dL) | (mg/dL) | dL) | dL) |
| PBS | — | 26 | 62 | 2.5 | 19.5 | 0.08 | 0.18 |
| 845219 | 5 | 96 | 64 | 2.4 | 19.3 | 0.08 | 0.15 |
| | 15 | 187 | 115 | 2.3 | 22.0 | 0.07 | 0.17 |
| 863577 | 5 | 176 | 160 | 2.5 | 17.2 | 0.09 | 0.13 |
| | 15 | 621 | 492 | 2.5 | 15.6 | 0.10 | 0.20 |
| 863579 | 5 | 50 | 50 | 2.5 | 19.9 | 0.10 | 0.13 |
| | 15 | 87 | 70 | 2.4 | 20.3 | 0.11 | 0.13 |
| 863637 | 5 | 321 | 301 | 1.7 | 19.3 | 0.05 | 0.19 |
| | 15 | 508 | 472 | 2.4 | 20.5 | 0.09 | 0.22 |
| 863682 | 5 | 306 | 156 | 2.3 | 20.0 | 0.06 | 0.13 |
| | 15 | 373 | 212 | 2.4 | 21.0 | 0.06 | 0.14 |

### Hematology Assays

[0369] Blood obtained from all mice groups were analyzed for RBC, WBC, platelets, neutrophils, lymphocytes, and monocyte counts, as well as hemoglobin, HCT and MCV levels. The results are presented in the Table below. ISIS oligonucleotides that caused changes in the levels of any of the hematology markers outside the expected range for antisense oligonucleotides were excluded in further studies.

TABLE 40
Blood cell count in CD1 mice at Day 45

| | Dose | RBC | Platelets | WBC | Neutrophils | Lymphocytes | Monocytes |
|---|---|---|---|---|---|---|---|
| | (mg/kg) | (×10⁶/μL) | (×10³/μL) | (×10³/μL) | (×10³/μL) | (×10³/μL) | (×10³/μL) |
| PBS | — | 9.4 | 1218 | 8.8 | 13 | 7078 | 367 |
| 845219 | 5 | 9.4 | 1349 | 7.2 | 13 | 5749 | 444 |
| | 15 | 9.3 | 1263 | 7.2 | 13 | 5664 | 511 |
| 863577 | 5 | 9.2 | 1401 | 8.0 | 17 | 5851 | 650 |
| | 15 | 8.2 | 1299 | 10.0 | 10 | 7718 | 1034 |
| 863579 | 5 | 10.0 | 1252 | 9.0 | 16 | 6876 | 587 |
| | 15 | 9.6 | 1256 | 8.2 | 11 | 6645 | 415 |
| 863637 | 5 | 9.0 | 956 | 5.7 | 14 | 4266 | 448 |
| | 15 | 9.3 | 843 | 6.8 | 13 | 5044 | 696 |
| 863682 | 5 | 9.4 | 1040 | 5.9 | 13 | 4581 | 447 |
| | 15 | 9.0 | 800 | 8.3 | 8 | 6757 | 694 |

TABLE 41
Hematology markers in CD1 mice at Day 45

| | Dose | Hemoglobin | HCT | MCV |
|---|---|---|---|---|
| | (mg/kg) | (g/dL) | (%) | (fL) |
| PBS | — | 14.1 | 45 | 48 |
| 845219 | 5 | 14.2 | 45 | 49 |
| | 15 | 13.8 | 43 | 46 |
| 863577 | 5 | 13.9 | 45 | 49 |
| | 15 | 12.2 | 39 | 48 |
| 863579 | 5 | 14.9 | 47 | 48 |
| | 15 | 15.3 | 48 | 50 |
| 863637 | 5 | 13.5 | 42 | 47 |
| | 15 | 13.8 | 43 | 47 |
| 863682 | 5 | 14.5 | 45 | 48 |
| | 15 | 13.6 | 43 | 48 |

### Body and Organ Weight Measurements

[0370] To evaluate the effect of ISIS oligonucleotides on the overall health of the animals, body and organ weights were measured. Body weights were measured every week and are presented in the Table below. Organ weights were measured and the data is also presented in the Table below. The results indicate that effect of treatment with the antisense oligonucleotides on body and organ weights was within the expected range for antisense oligonucleotides.

TABLE 42
Body weights (g) in CD1 mice

| | Dose | Baseline | Week 1 | Week 2 | Week 3 | Week 4 | Week 5 | Week 6 |
|---|---|---|---|---|---|---|---|---|
| | (mg/kg) | (day 1) | (day 8) | (day 15) | (day 22) | (day 29) | (day 36) | (day 42) |
| PBS | — | 27 | 30 | 32 | 32 | 33 | 35 | 35 |
| 845219 | 5 | 28 | 33 | 34 | 35 | 37 | 40 | 39 |
| | 15 | 29 | 33 | 34 | 35 | 36 | 38 | 38 |
| 863577 | 5 | 26 | 31 | 32 | 33 | 34 | 37 | 35 |
| | 15 | 27 | 31 | 31 | 32 | 34 | 36 | 35 |
| 863579 | 5 | 28 | 32 | 33 | 32 | 36 | 38 | 36 |
| | 15 | 27 | 32 | 33 | 32 | 36 | 38 | 37 |
| 863637 | 5 | 28 | 33 | 34 | 35 | 36 | 37 | 38 |
| | 15 | 27 | 32 | 34 | 34 | 36 | 38 | 38 |
| 863682 | 5 | 26 | 32 | 33 | 32 | 35 | 37 | 36 |
| | 15 | 27 | 31 | 32 | 33 | 34 | 36 | 36 |

TABLE 43
Organ weights (g) in CD1 mice

| | Dose | | | |
|---|---|---|---|---|
| | (mg/kg) | Liver | Spleen | Kidney |
| PBS | — | 1.84 | 0.08 | 0.50 |
| 845219 | 5 | 2.42 | 0.13 | 0.54 |
| | 15 | 2.41 | 0.15 | 0.54 |
| 863577 | 5 | 2.47 | 0.11 | 0.58 |
| | 15 | 2.62 | 0.15 | 0.59 |
| 863579 | 5 | 2.53 | 0.13 | 0.57 |
| | 15 | 2.82 | 0.12 | 0.54 |
| 863637 | 5 | 2.38 | 0.17 | 0.52 |
| | 15 | 2.67 | 0.22 | 0.58 |
| 863682 | 5 | 1.79 | 0.11 | 0.54 |
| | 15 | 2.13 | 0.21 | 0.53 |

### Example 6: Tolerability of ISIS Oligonucleotides Targeting Human PCSK9 in Sprague-Dawley Rats

[0371] Sprague-Dawley rats are a multipurpose model used for safety and efficacy evaluations. The rats were treated with ISIS antisense oligonucleotides from the studies described in the Examples above and evaluated for changes in the levels of various plasma chemistry markers.

### Treatment

[0372] Male Sprague-Dawley rats were maintained on a 12-hour light/dark cycle and fed ad libitum with Purina normal rat chow, diet 5001. Groups of 4 Sprague-Dawley rats each were injected subcutaneously once a week for 6 weeks with 15 mg/kg of ISIS oligonucleotide. Forty eight hours after the last dose, rats were euthanized and organs and plasma were harvested for further analysis.

[0373] Liver Function

[0374] To evaluate the effect of ISIS oligonucleotides on hepatic function, plasma levels of transaminases were measured using an automated clinical chemistry analyzer (Hitachi Olympus AU400e, Melville, NY). Plasma levels of ALT (alanine transaminase) and AST (aspartate transaminase) were measured and the results are presented in the Table below expressed in IU/L. Plasma levels of bilirubin (TBIL), BUN, albumin (ALB), and creatinine (CRE) were also measured using the same clinical chemistry analyzer and the results are also presented in the Table below expressed in mg/dL. Plasma levels of albumin were also measured using the same clinical chemistry analyzer and the results are also presented in the Table below expressed in g/dL.

TABLE 44
Liver function markers in Sprague-Dawley rats

| | ALT | AST | ALB | BUN | CRE | TBIL |
|---|---|---|---|---|---|---|
| | (IU/L) | (IU/L) | (g/dL) | (mg/dL) | (mg/dL) | (mg/dL) |
| PBS | 20 | 64 | 3.1 | 13 | 0.2 | 0.1 |
| 863568 | 40 | 70 | 3.5 | 14 | 0.2 | 0.2 |
| 863576 | 39 | 94 | 3.7 | 16 | 0.3 | 0.1 |
| 863579 | 33 | 91 | 3.3 | 14 | 0.2 | 0.1 |
| 863581 | 36 | 154 | 2.8 | 18 | 0.3 | 0.2 |
| 863582 | 38 | 122 | 2.9 | 20 | 0.3 | 0.1 |
| 863587 | 38 | 87 | 3.0 | 12 | 0.2 | 0.1 |
| 863633 | 26 | 78 | 3.0 | 16 1 | 0.3 | 0.1 |
| 863655 | 27 | 84 | 3.1 | 15 | 0.2 | 0.1 |
| 863670 | 30 | 91 | 3.2 | 15 | 0.2 | 0.1 |
| 863681 | 29 | 81 | 3.2 | 14 | 0.2 | 0.1 |

### Kidney Function

[0375] To evaluate the effect of ISIS oligonucleotides on kidney function, urine levels of blood creatinine and total protein were measured using an automated clinical chemistry analyzer (Hitachi Olympus AU400e, Melville, NY). Results are presented in the Table below, expressed in mg/dL. ISIS oligonucleotides that caused changes in the levels of any of the kidney function markers outside the expected range for antisense oligonucleotides were excluded in further studies. ‘N/A’ indicates that data is not available for that group.

TABLE 45
Kidney function markers (mg/dL) in Sprague-Dawley rats

| | CRE | TP |
|---|---|---|
| | (mg/dL) | (mg/dL) |
| PBS | 79 | 59 |
| 863568 | 111 | 137 |
| 863576 | N/A | N/A |
| 863579 | 93 | 117 |
| 863581 | 54 | 75 |
| 863582 | 71 | 91 |
| 863587 | 64 | 86 |
| 863633 | 100 | 85 |
| 863655 | 85 | 117 |
| 863670 | 89 | 104 |
| 863681 | 144 | 142 |

### Body and Organ Weights

[0376] To evaluate the effect of ISIS oligonucleotides on the overall health of the animals, body and organ weights were measured. Body weights were measured every week and are presented in the Table below. Organ weights were measured and the data is also presented in the Table below. The results indicate that effect of treatment with antisense oligonucleotides on body and organ weights was within the expected range for antisense oligonucleotides.

TABLE 46
Body weight (g)

| | | | | | Week 4 | Week 5 | Week 6 |
|---|---|---|---|---|---|---|---|
| | Baseline | Week 1 | Week 2 | Week 3 | (day | (day | (day |
| | (day 1) | (day 8) | (day 15) | (day 22) | 29) | 36) | 43) |
| PBS | 201 | 267 | 344 | 389 | 433 | 451 | 470 |
| 863568 | 200 | 265 | 334 | 371 | 404 | 419 | 435 |
| 863576 | 272 | 327 | 361 | 389 | 417 | 424 | 435 |
| 863579 | 264 | 313 | 357 | 379 | 407 | 420 | 430 |
| 863581 | 195 | 258 | 329 | 361 | 397 | 411 | 430 |
| 863582 | 204 | 273 | 350 | 387 | 423 | 440 | 458 |
| 863587 | 205 | 273 | 353 | 398 | 439 | 459 | 474 |
| 863633 | 271 | 319 | 361 | 377 | 401 | 406 | 417 |
| 863655 | 195 | 256 | 330 | 366 | 406 | 417 | 435 |
| 863670 | 189 | 249 | 319 | 351 | 384 | 394 | 406 |
| 863681 | 275 | 312 | 364 | 386 | 415 | 426 | 435 |

TABLE 47
Organ weights (g)

| | Liver | Spleen | Kidney |
|---|---|---|---|
| PBS | 12 | 0.8 | 3.4 |
| 863568 | 16 | 1.2 | 3.3 |
| 863576 | 12 | 1.3 | 3.0 |
| 863579 | 11 | 1.0 | 3.0 |
| 863581 | 13 | 2.0 | 3.1 |
| 863582 | 14 | 2.1 | 3.5 |
| 863587 | 14 | 1.1 | 3.4 |
| 863633 | 12 | 1.6 | 3.2 |
| 863655 | 11 | 1.7 | 3.4 |
| 863670 | 12 | 1.0 | 2.9 |
| 863681 | 12 | 1.1 | 3.3 |

### Example 7: Effect of Antisense Inhibition of PCSK9 in Transgenic Mouse Model

[0377] A transgenic mouse model developed at UCI and has never been described in the literature. The human PCSK9 genomic construct contained in fosmid ABC7-611722G24 was restricted with Nhel to produce a DNA fragment containing the entire genomic sequence as well as 8 Kb of 5′ and 0.4 Kb of 3′ noncoding sequence. PCSK9 transgenic mice were produced by random insertion via micronucleus injection. Progeny expressed human PCSK9 mRNA in the liver and secreted human PCSK9 plasma protein.

### Treatment

[0378] Transgenic mice were maintained on a 12-hour light/dark cycle and were fed ad libitum normal Purina mouse chow. Animals were acclimated for at least 7 days in the research facility before initiation of the experiment. Antisense oligonucleotides (ASOs) were prepared in buffered saline (PBS) and sterilized by filtering through a 0.2 micron filter. Oligonucleotides were dissolved in 0.9% PBS for injection.

[0379] The Tg mice were divided into 27 groups of 3 mice each. Groups received subcutaneous injections of ISIS oligonucleotide at a dose of 0.25 mg/kg, 1.00 mg/kg, or 5.00 mg/kg once per week for 4 weeks. One group of 4 mice received subcutaneous injections of PBS once per week for 4 weeks. The saline-injected group served as the control group to which oligonucleotide-treated groups were compared.

### RNA Analysis

[0380] On day 26, RNA was extracted from liver for real-time PCR analysis of measurement of mRNA expression of PCSK9. Results are presented as percent change of mRNA, relative to PBS control, normalized with RIBOGREEN®. As shown in the Table below, treatment with ISIS antisense oligonucleotides resulted in significant reduction of PCSK9 mRNA in comparison to the PBS control.

TABLE 48
Percent inhibition of PCSK9 mRNA in the transgenic
mice liver relative to the PBS control

| | Weekly | | |
|---|---|---|---|
| | Dose | % | |
| | (mg/kg) | Inhibition | ED₅₀ |
| 863568 | 0.25 | 26 | 0.5 |
| | 1 | 76 | |
| | 5 | 95 | |
| 863579 | 0.25 | 9 | 1.4 |
| | 1 | 41 | |
| | 5 | 84 | |
| 863581 | 0.25 | 12 | 0.6 |
| | 1 | 73 | |
| | 5 | 80 | |
| 863582 | 0.25 | 32 | 0.5 |
| | 1 | 71 | |
| | 5 | 91 | |
| 863587 | 0.25 | 27 | 0.5 |
| | 1 | 71 | |
| | 5 | 87 | |
| 863633 | 0.25 | 60 | 0.2 |
| | 1 | 96 | |
| | 5 | 99 | |
| 863655 | 0.25 | 37 | 0.3 |
| | 1 | 94 | |
| | 5 | 99 | |
| 863670 | 0.25 | 0 | 1.0 |
| | 1 | 62 | |
| | 5 | 87 | |
| 863681 | 0.25 | 25 | 0.9 |
| | 1 | 45 | |
| | 5 | 94 | |

### Protein Analysis

[0381] PCSK9 plasma protein was measured by a human-specific ELISA kit (R&D Systems). Results are presented as percent change of protein levels, relative to PBS control. As shown in the Table below, treatment with ISIS antisense oligonucleotides resulted in significant reduction of PCSK9 plasma protein levels in comparison to the PBS control.

TABLE 49
Percent inhibition of PCSK9 plasma protein in the
transgenic mice relative to the PBS control

| | Weekly | | |
|---|---|---|---|
| | Dose | % | |
| | (mg/kg) | Inhibition | ED₅₀ |
| 863568 | 0.25 | 37 | 0.4 |
| | 1 | 74 | |
| | 5 | 97 | |
| 863579 | 0.25 | 5 | 1.5 |
| | 1 | 41 | |
| | 5 | 81 | |
| 863581 | 0.25 | 31 | 0.6 |
| | 1 | 59 | |
| | 5 | 91 | |
| 863582 | 0.25 | 25 | 0.5 |
| | 1 | 73 | |
| | 5 | 95 | |
| 863587 | 0.25 | 33 | 0.4 |
| | 1 | 77 | |
| | 5 | 93 | |
| 863633 | 0.25 | 50 | 0.3 |
| | 1 | 97 | |
| | 5 | 99 | |
| 863655 | 0.25 | 44 | 0.3 |
| | 1 | 93 | |
| | 5 | 99 | |
| 863670 | 0.25 | 23 | 1.6 |
| | 1 | 38 | |
| | 5 | 72 | |
| 863681 | 0.25 | 28 | 0.8 |
| | 1 | 54 | |
| | 5 | 89 | |

### LDL-Cholesterol Levels

[0382] Levels of LDL-cholesterol in the plasma were measured by an automated clinical chemistry analyzer (Hitachi Olympus AU400e, Melville, NY). Levels of LDL receptor (LDLr) protein in the liver were also measured. Results are presented as percent change of levels, relative to PBS control. As shown in the Table below, treatment with several ISIS antisense oligonucleotides resulted in significant reduction of levels of LDL-cholesterol in the plasma in comparison to the PBS control. Correspondingly, it was observed that treatment with ISIS antisense oligonucleotides resulted in dose-dependent liver LDLr protein increases in the mice.

TABLE 50
Inhibition of LDL-cholesterol levels in the
plasma relative to the PBS control

| | Weekly | |
|---|---|---|
| | Dose | % |
| | (mg/kg) | inhibition |
| 863568 | 0.25 | 7 |
| | 1 | 41 |
| | 5 | 59 |
| 863579 | 0.25 | 0 |
| | 1 | 15 |
| | 5 | 33 |
| 863581 | 0.25 | 30 |
| | 1 | 17 |
| | 5 | 41 |
| 863582 | 0.25 | 23 |
| | 1 | 28 |
| | 5 | 50 |
| 863587 | 0.25 | 20 |
| | 1 | 38 |
| | 5 | 38 |
| 863633 | 0.25 | 27 |
| | 1 | 66 |
| | 5 | 71 |
| 863655 | 0.25 | 29 |
| | 1 | 58 |
| | 5 | 74 |
| 863670 | 0.25 | 19 |
| | 1 | 0 |
| | 5 | 39 |
| 863681 | 0.25 | 21 |
| | 1 | 23 |
| | 5 | 35 |

TABLE 51
Percent increase of liver LDLr in the transgenic
mice relative to the PBS control

| | Weekly | |
|---|---|---|
| | Dose | % |
| | (mg/kg) | increase |
| 863568 | 0.25 | 3 |
| | 1 | 61 |
| | 5 | 245 |
| 863579 | 0.25 | −46 |
| | 1 | −45 |
| | 5 | 132 |
| 863581 | 0.25 | −44 |
| | 1 | 6 |
| | 5 | 73 |
| 863582 | 0.25 | −19 |
| | 1 | 93 |
| | 5 | 191 |
| 863587 | 0.25 | −6 |
| | 1 | −10 |
| | 5 | 95 |
| 863633 | 0.25 | −22 |
| | 1 | 131 |
| | 5 | 269 |
| 863655 | 0.25 | 0 |
| | 1 | 129 |
| | 5 | 207 |
| 863670 | 0.25 | 9 |
| | 1 | 81 |
| | 5 | 78 |
| 863681 | 0.25 | 123 |
| | 1 | 360 |
| | 5 | 222 |

### Example 8: Measurement of Viscosity of Antisense Oligonucleotides Targeting Human PCSK9

[0383] The viscosity of select antisense oligonucleotides from the studies described above was measured with the aim of screening out antisense oligonucleotides which have a viscosity of more than 40 centipoise (cP). Oligonucleotides having a viscosity greater than 40 cP would have less than optimal viscosity.

[0384] Oligonucleotides (32-35 mg) were weighed into a glass vial, 120 μL of water was added and the antisense oligonucleotide was dissolved into solution by heating the vial at 50° C. Part (75 μL) of the pre-heated sample was pipetted to a micro-viscometer (Cambridge). The temperature of the micro-viscometer was set to 25° C. and the viscosity of the sample was measured. Another part (20 μL) of the pre-heated sample was pipetted into 10 mL of water for UV reading at 260 nM at 85° C. (Cary UV instrument). The results are presented in the Table below, where the concentration of each antisense oligonucleotide was 350 mg/ml, and indicate that all the antisense oligonucleotides solutions were optimal in their viscosity under the criterion stated above.

TABLE 52
Viscosity of antisense oligonucleotides
targeting human PCSK9

| | Viscosity | Concentration |
|---|---|---|
| ISIS No | (cp) | (mg/mL) |
| 863568 | 39 | 325 |
| 863576 | 20 | 325 |
| 863579 | 19 | 325 |
| 863581 | 25 | 300 |
| 863582 | 17 | 300 |
| 863587 | 14 | 325 |
| 863633 | 12 | 325 |
| 863655 | 10 | 325 |
| 863670 | 21 | 325 |
| 863681 | 15 | 325 |

### Example 9: Effect of ISIS Antisense Oligonucleotides Targeting Human PCSK9 in Cynomolgus Monkeys

[0385] Cynomolgus monkeys were treated with ISIS antisense oligonucleotides selected from studies described in the Examples above. Antisense oligonucleotide efficacy and tolerability, as well as their pharmacokinetic profile in the liver and kidney, were evaluated.

[0386] At the time this study was undertaken, the cynomolgus monkey genomic sequence was not available in the National Center for Biotechnology Information (NCBI) database; therefore, cross-reactivity with the cynomolgus monkey gene sequence could not be confirmed. Instead, the sequences of the ISIS antisense oligonucleotides used in the cynomolgus monkeys was compared to a rhesus monkey sequence for homology. It is expected that ISIS oligonucleotides with homology to the rhesus monkey sequence are fully cross-reactive with the cynomolgus monkey sequence as well. The human antisense oligonucleotides tested are cross-reactive with the rhesus genomic sequence (the complement of GENBANK Accession No. NW_005092960.1 truncated from nucleotides 83474000 to 83501000, designated herein as SEQ ID NO: 1544). The greater the complementarity between the human oligonucleotide and the rhesus monkey sequence, the more likely the human oligonucleotide can cross-react with the rhesus monkey sequence. The start and stop sites of each oligonucleotide to SEQ ID NO: 1544 is presented in the Table below. “Start site” indicates the 5′-most nucleotide to which the gapmer is targeted in the rhesus monkey gene sequence.

TABLE 53

| | Target | | Target | SEQ |
|---|---|---|---|---|
| ISIS | Start | | Stop | ID |
| No | Site | Mismatches | Site | NO |
| 863568 | 25252 | 1 | 25267 | 1528 |
| 863579 | 25510 | 2 | 25525 | 763 |
| 863581 | 25520 | 1 | 25535 | 1071 |
| 863582 | 25521 | 1 | 25536 | 1147 |
| 863587 | 25712 | 2 | 25727 | 1149 |
| 863633 | 3911 | 0 | 3926 | 1016 |
| 863655 | 10464 | 1 | 10479 | 955 |
| 863670 | 15306 | 0 | 15321 | 1195 |
| 863681 | 17270 | 0 | 17285 | 353 |

### Treatment

[0387] Prior to the study, the monkeys were kept in quarantine during which the animals were observed daily for general health. The monkeys were 2-4 years old and weighed 2-4 kg. Nine groups of 5 randomly assigned male cynomolgus monkeys each were injected subcutaneously with ISIS oligonucleotide or PBS in clockwise rotation between four different sites on the backs of the monkeys (i.e. left, right, top, and bottom) on each day of dosing; one site per dose. The monkeys were dosed twice a week (days 1, 5, 9, and 14) for the first two weeks, and then subsequently once a week for 10 weeks (days 21, 28, 35, 42, 49, 56, 63, 70, 77, and 84) with 10 mg/kg of ISIS oligonucleotide. A control group of 5 cynomolgus monkeys was injected with PBS in a similar manner and served as the control group.

[0388] During the study period, the monkeys were observed twice daily for signs of illness or distress. Any animal experiencing more than momentary or slight pain or distress due to the treatment, injury or illness was treated by the veterinary staff with approved analgesics or agents to relieve the pain after consultation with the Study Director. Any animal in poor health or in a possible moribund condition was identified for further monitoring and possible euthanasia. Scheduled euthanasia of the animals was conducted on day 86 approximately 48 hours post-dose by exsanguination while under deep anesthesia. The protocols described in the Example were approved by the Institutional Animal Care and Use Committee (IACUC).

### Target Reduction

### RNA Analysis

[0389] On day 86, RNA was extracted from liver for real-time PCR analysis of measurement of mRNA expression of PCSK9. Results are presented as percent change of mRNA, relative to PBS control, normalized with RIBOGREEN®. As shown in the Table below, treatment with ISIS antisense oligonucleotides, ISIS 863633, ISIS 863670, and ISIS 863681, which had no mismatches with the rhesus gene, resulted in significant reduction of PCSK9 mRNA in comparison to the PBS control.

TABLE 54
Percent inhibition of PCSK9 mRNA in the
cynomolgus monkey liver relative to the PBS control

| | % |
|---|---|
| | inhibition |
| 863655 | 46 |
| 863633 | 88 |
| 863568 | 74 |
| 863579 | 35 |
| 863582 | 55 |
| 863581 | 53 |
| 863587 | 36 |
| 863670 | 84 |
| 863681 | 87 |

### Protein Analysis

[0390] Approximately 1 mL of blood was collected from all available animals on day −7 (pre-treatment), Days 16, 30, 58, and 86 (approximately 48 hours post-dose on Days 14, 28, 56, and 84, respectively) and placed in tubes containing the potassium salt of EDTA. The tubes were centrifuged (3000 rpm for 10 min at 4° C.) to obtain plasma. The results are presented in the Table below as a percentage increase or decrease over the levels at Day −7 (pre-treatment levels). As shown in the Table below, treatment with ISIS antisense oligonucleotides, ISIS 863633, ISIS 863670, and ISIS 863681, which had no mismatches with the rhesus gene, resulted in significant reduction of PCSK9 protein levels.

[0391] Liver tissue was also analyzed for levels of LDL receptor (LDLr) protein induction levels. The results are presented in the Table below. The data demonstrates that treatment with the three antisense oligonucleotides that are homologous to the rhesus monkey genomic sequence resulted in hepatic LDLr protein induction after 12 weeks of treatment.

TABLE 55
Plasma protein levels (% of pre-treatment
levels) in the cynomolgus monkey

| | Day 16 | Day 30 | Day 86 |
|---|---|---|---|
| PBS | 34 | 36 | 18 |
| 863655 | −13 | −2 | −36 |
| 863633 | −90 | −91 | −91 |
| 863568 | −19 | −14 | −22 |
| 863579 | 34 | 36 | 18 |
| 863582 | 8 | 2 | 35 |
| 863581 | 16 | 8 | 11 |
| 863587 | −3 | 1 | −12 |
| 863670 | −79 | −83 | −86 |
| 863681 | −80 | −82 | −86 |

TABLE 56
Hepatic LDLr protein levels (% of PBS
control) in the cynomolgus monkey

| | % increase |
|---|---|
| 863655 | 98 |
| 863633 | 399 |
| 863568 | 243 |
| 863579 | 163 |
| 863582 | 115 |
| 863581 | 156 |
| 863587 | 158 |
| 863670 | 521 |
| 863681 | 417 |

### Plasma Lipid Levels

[0392] To evaluate the effect of ISIS oligonucleotides on total cholesterol, LDL-Cholesterol, HDL-cholesterol, and triglyceride levels, monkeys were fasted overnight prior to blood collection. Approximately 1.7 mL of blood samples were collected from all the study groups. Blood was collected in tubes without anticoagulant for serum separation. The tubes were kept at room temperature for a minimum of 90 minutes and then centrifuged at 3,000 rpm for 10 minutes at room temperature to obtain serum. Levels were measured using a Toshiba 200FR NEO chemistry analyzer (Toshiba Co., Japan). The data demonstrates that treatment with the three antisense oligonucleotides with homology with the rhesus monkey genomic sequence resulted in significant reduction of plasma total cholesterol and LDL-cholesterol. As expected, reduction of human PCSK9 levels did not affect plasma HDL-cholesterol or triglyceride levels.

TABLE 57

| | Total | LDL- | HDL- | |
|---|---|---|---|---|
| | cholesterol | cholesterol | cholesterol | Triglycerides |
| PBS | 146 | 37 | 110 | 71 |
| 863655 | 152 | 73 | 71 | 46 |
| 863633 | 115 | 17 | 99 | 57 |
| 863568 | 128 | 32 | 99 | 51 |
| 863579 | 109 | 44 | 71 | 45 |
| 863582 | 137 | 38 | 103 | 37 |
| 863581 | 174 | 51 | 122 | 34 |
| 863587 | 140 | 45 | 102 | 35 |
| 863670 | 95 | 17 | 83 | 45 |
| 863681 | 109 | 19 | 99 | 29 |

### Tolerability Studies

### Clinical Chemistry Parameters

[0393] To evaluate the effect of ISIS oligonucleotides on hepatic function, monkeys were fasted overnight prior to blood collection. Approximately 1.7 mL of blood samples were collected from all the study groups. Blood was collected in tubes without anticoagulant for serum separation. The tubes were kept at room temperature for a minimum of 90 minutes and then centrifuged at 3,000 rpm for 10 minutes at room temperature to obtain serum. Levels of total bilirubin (TBIL), aspartate aminotransferase (AST), alanine aminotransferase (ALT), and albumin (ALB) were measured using a Toshiba 200FR NEO chemistry analyzer (Toshiba Co., Japan). The results indicate that antisense oligonucleotides had no effect on liver function outside the expected range for antisense oligonucleotides. Specifically, ISIS 863633 was observed to be well tolerated.

TABLE 58
Plasma Chemistry markers in cynomolgus monkey on Day 86

| | ALT | AST | Bilirubin | ALB |
|---|---|---|---|---|
| | (IU/L) | (IU/L) | (mg/dL) | (g/dL) |
| PBS | 65 | 64 | 0.2 | 4.1 |
| 863655 | 63 | 59 | 0.3 | 3.5 |
| 863633 | 47 | 70 | 0.3 | 4.0 |
| 863568 | 44 | 64 | 0.3 | 4.1 |
| 863579 | 50 | 52 | 0.2 | 4.1 |
| 863582 | 42 | 57 | 0.2 | 4.2 |
| 863581 | 55 | 61 | 0.3 | 4.2 |
| 863587 | 110 | 76 | 0.3 | 3.9 |
| 863670 | 42 | 64 | 0.3 | 4.1 |
| 863681 | 62 | 60 | 0.3 | 4.1 |

### Kidney Function

[0394] To evaluate the effect of ISIS oligonucleotides on kidney function, monkeys were fasted overnight prior to blood collection. Approximately 1.7 mL of blood samples were collected from all the study groups. Blood was collected in tubes without anticoagulant for serum separation. The tubes were kept at room temperature for a minimum of 90 minutes and then centrifuged at 3,000 rpm for 10 minutes at room temperature to obtain serum. Levels of BUN and creatinine were measured using a Toshiba 200FR NEO chemistry analyzer (Toshiba Co., Japan). Results are presented in the Table below, expressed in mg/dL.

[0395] The plasma chemistry data indicate that most of the ISIS oligonucleotides did not have any effect on the kidney function outside the expected range for antisense oligonucleotides. Specifically, ISIS 863633 was observed to be well tolerated.

TABLE 59
Plasma BUN and creatinine levels
(mg/dL) in cynomolgus monkeys at day 86

| | BUN | Creatinine |
|---|---|---|
| PBS | 31 | 0.8 |
| 863655 | 26 | 0.8 |
| 863633 | 27 | 0.8 |
| 863568 | 27 | 0.9 |
| 863579 | 24 | 0.8 |
| 863582 | 24 | 0.8 |
| 863581 | 27 | 0.8 |
| 863587 | 24 | 0.8 |
| 863670 | 26 | 1.0 |
| 863681 | 23 | 0.8 |

### Hematology

[0396] To evaluate any effect of ISIS oligonucleotides in cynomolgus monkeys on hematologic parameters, approximately 0.5 mL of blood was collected from each of the available study animals in tubes containing K₂-EDTA. Samples were analyzed for red blood cell (RBC) count, white blood cells (WBC) count, individual white blood cell counts, such as that of monocytes, neutrophils, lymphocytes, as well as for platelet count, hemoglobin content and hematocrit, using an ADVIA120 hematology analyzer (Bayer, USA). The data is presented in the Tables below.

[0397] The data indicate the oligonucleotides did not cause any changes in hematologic parameters outside the expected range for antisense oligonucleotides at this dose. Specifically, ISIS 863633 was observed to be well tolerated.

TABLE 60
Blood cell counts in cynomolgus monkeys on day 86

| | RBC | Platelets | WBC | Neutro- | Lympho- | Mono- |
|---|---|---|---|---|---|---|
| | (×10⁶/ | (×10³/ | (×10³/ | phils | cytes | cytes |
| | μL) | μL) | μL) | (×10³/μL) | (×10³/μL) | (×10³/μL) |
| PBS | 5.5 | 340 | 9.0 | 3.1 | 5.4 | 0.3 |
| 863655 | 5.6 | 361 | 9.7 | 3.7 | 5.4 | 0.3 |
| 863633 | 5.6 | 395 | 11.4 | 4.5 | 6.5 | 0.3 |
| 863568 | 5.8 | 409 | 12.1 | 602 | 5.4 | 0.3 |
| 863579 | 5.9 | 390 | 8.0 | 2.2 | 5.3 | 0.3 |
| 863582 | 5.6 | 333 | 8.9 | 3.0 | 5.5 | 0.3 |
| 863581 | 5.8 | 382 | 8.2 | 2.4 | 5.3 | 0.3 |
| 863587 | 6.0 | 348 | 8.8 | 2.3 | 6.0 | 0.2 |
| 863670 | 5.4 | 417 | 10.7 | 4.3 | 5.9 | 0.3 |
| 863681 | 5.6 | 408 | 9.0 | 3.1 | 5.5 | 0.2 |

TABLE 61

| | Hemoglobin | HCT |
|---|---|---|
| | (g/dL) | (%) |
| PBS | 12.8 | 45 |
| 863655 | 13.0 | 43 |
| 863633 | 12.9 | 43 |
| 863568 | 13.0 | 44 |
| 863579 | 13.5 | 46 |
| 863582 | 12.4 | 43 |
| 863581 | 13.0 | 44 |
| 863587 | 13.5 | 46 |
| 863670 | 12.7 | 43 |
| 863681 | 12.7 | 43 |

[0398] Overall, the results of the study indicate that ISIS 863633 is the most potent and well tolerated compound of those tested for inhibiting PCSK9 and is an important candidate for the treatment of cardiovascular diseases, specifically for lowering LDL-cholesterol levels.

### Example 10: Comparative Inhibition of Antisense Oligonucleotides Targeting Human PCSK9 in a Dose Response Assay

[0399] The unconjugated parent oligonucleotides of the antisense oligonucleotides tested in the monkey study were compared with previously designed compounds. ISIS 848542, ISIS 848593, ISIS 848597, ISIS 848598, ISIS 848630, ISIS 848833, ISIS 849040, ISIS 849171, and ISIS 849236 were tested for efficacy with ISIS 405879 and ISIS 405995, which have previously been determined to be some of the most potent antisense compounds in vitro (see e.g., U.S. Pat. No. 8,084,437), as well as ISIS 431131 and ISIS 480604, which have been previously described in U.S. Pat. No. 9,127,276.

[0400] Cells were plated at a density of 10,000 cells per well and 39.1 nM, 156.25 nM, 625 nM, 2,500 nM, and 10,000 nM concentrations of antisense oligonucleotide was added to the medium for free uptake of oligonucleotide by the cells. After a treatment period of approximately 48 hours, RNA was isolated from the cells and PCSK9 mRNA levels were measured by quantitative real-time PCR. Human PCSK9 primer probe set from ABI (ID #Hs03037355_m1) was used to measure mRNA levels. PCSK9 mRNA levels were adjusted according to total RNA content, as measured by RIBOGREEN®. Results are presented as percent inhibition of PCSK9, relative to untreated control cells.

[0401] The half maximal inhibitory concentration (IC₅₀) of each oligonucleotide is also presented. PCSK9 mRNA levels were reduced in a dose-dependent manner in antisense oligonucleotide treated cells. ISIS 848542, ISIS 848593, ISIS 848597, ISIS 848598, ISIS 848630, ISIS 848833, ISIS 849040, ISIS 849171, and ISIS 849236 demonstrated superior efficacy compared to all previously disclosed oligonucleotides.

TABLE 62

| | 39.1 | 156.25 | 625.0 | 2500.0 | 10000.0 | IC₅₀ |
|---|---|---|---|---|---|---|
| ISIS No | nM | nM | nM | nM | nM | (μM) |
| 405879 | 0 | 0 | 0 | 0 | 0 | >10 |
| 405995 | 0 | 0 | 0 | 0 | 0 | >10 |
| 431131 | 0 | 3 | 0 | 0 | 5 | >10 |
| 480604 | 0 | 1 | 19 | 31 | 36 | >10 |
| 848542 | 9 | 37 | 70 | 83 | 88 | 0.4 |
| 848593 | 19 | 36 | 51 | 53 | 69 | 1.1 |
| 848597 | 41 | 67 | 78 | 86 | 91 | 0.04 |
| 848598 | 41 | 64 | 76 | 85 | 90 | 0.1 |
| 848630 | 0 | 17 | 59 | 79 | 85 | 0.9 |
| 848833 | 4 | 66 | 88 | 93 | 94 | 0.2 |
| 849040 | 41 | 93 | 98 | 99 | 98 | <0.03 |
| 849171 | 0 | 52 | 86 | 94 | 96 | 0.3 |
| 849236 | 0 | 26 | 71 | 89 | 95 | 0.6 |

The application's sequence listing, which the Patent Office published only in electronic form, follows.

SEQUENCE LISTING (1550 sequences)

SEQ ID NO: 1 - DNA, 3731 bp, Homo sapiens
  source 1..3731: mol_type = other DNA
gtccgatggggctctggtggcgtgatctgcgcgccccaggcgtcaagcacccacaccctagaaggtttccgcagcgacgtcgaggcgctcatggttgcaggcgggcgccgccgttcagttcagggtctgagcctggaggagtgagccaggcagtgagactggctcgggcgggccgggacgcgtcgttgcagcagcggctcccagctcccagccaggattccgcgcgccccttcacgcgccctgctcctgaacttcagctcctgcacagtcctccccaccgcaaggctcaaggcgccgccggcgtggaccgcgcacggcctctaggtctcctcgccaggacagcaacctctcccctggccctcatgggcaccgtcagctccaggcggtcctggtggccgctgccactgctgctgctgctgctgctgctcctgggtcccgcgggcgcccgtgcgcaggaggacgaggacggcgactacgaggagctggtgctagccttgcgttccgaggaggacggcctggccgaagcacccgagcacggaaccacagccaccttccaccgctgcgccaaggatccgtggaggttgcctggcacctacgtggtggtgctgaaggaggagacccacctctcgcagtcagagcgcactgcccgccgcctgcaggcccaggctgcccgccggggatacctcaccaagatcctgcatgtcttccatggccttcttcctggcttcctggtgaagatgagtggcgacctgctggagctggccttgaagttgccccatgtcgactacatcgaggaggactcctctgtctttgcccagagcatcccgtggaacctggagcggattacccctccacggtaccgggcggatgaataccagccccccgacggaggcagcctggtggaggtgtatctcctagacaccagcatacagagtgaccaccgggaaatcgagggcagggtcatggtcaccgacttcgagaatgtgcccgaggaggacgggacccgcttccacagacaggccagcaagtgtgacagtcatggcacccacctggcaggggtggtcagcggccgggatgccggcgtggccaagggtgccagcatgcgcagcctgcgcgtgctcaactgccaagggaagggcacggttagcggcaccctcataggcctggagtttattcggaaaagccagctggtccagcctgtggggccactggtggtgctgctgcccctggcgggtgggtacagccgcgtcctcaacgccgcctgccagcgcctggcgagggctggggtcgtgctggtcaccgctgccggcaacttccgggacgatgcctgcctctactccccagcctcagctcccgaggtcatcacagttggggccaccaatgcccaagaccagccggtgaccctggggactttggggaccaactttggccgctgtgtggacctctttgccccaggggaggacatcattggtgcctccagcgactgcagcacctgctttgtgtcacagagtgggacatcacaggctgctgcccacgtggctggcattgcagccatgatgctgtctgccgagccggagctcaccctggccgagttgaggcagagactgatccacttctctgccaaagatgtcatcaatgaggcctggttccctgaggaccagcgggtactgacccccaacctggtggccgccctgccccccagcacccatggggcaggttggcagctgttttgcaggactgtatggtcagcacactcggggcctacacggatggccacagccgtcgcccgctgcgccccagatgaggagctgctgagctgctccagtttctccaggagtgggaagcggcggggcgagcgcatggaggcccaagggggcaagctggtctgccgggcccacaacgcttttgggggtgagggtgtctacgccattgccaggtgctgcctgctaccccaggccaactgcagcgtccacacagctccaccagctgaggccagcatggggacccgtgtccactgccaccaacagggccacgtcctcacaggctgcagctcccactgggaggtggaggaccttggcacccacaagccgcctgtgctgaggccacgaggtcagcccaaccagtgcgtgggccacagggaggccagcatccacgcttcctgctgccatgccccaggtctggaatgcaaagtcaaggagcatggaatcccggcccctcaggagcaggtgaccgtggcctgcgaggagggctggaccctgactggctgcagtgccctccctgggacctcccacgtcctgggggcctacgccgtagacaacacgtgtgtagtcaggagccgggacgtcagcactacaggcagcaccagcgaaggggccgtgacagccgttgccatctgctgccggagccggcacctggcgcaggcctcccaggagctccagtgacagccccatcccaggatgggtgtctggggagggtcaagggctggggctgagctttaaaatggttccgacttgtccctctctcagccctccatggcctggcacgaggggatggggatgcttccgcctttccggggctgctggcctggcccttgagtggggcagcctccttgcctggaactcactcactctgggtgcctcctccccaggtggaggtgccaggaagctccctccctcactgtggggcatttcaccattcaaacaggtcgagctgtgctcgggtgctgccagctgctcccaatgtgccgatgtccgtgggcagaatgacttttattgagctcttgttccgtgccaggcattcaatcctcaggtctccaccaaggaggcaggattcttcccatggataggggagggggcggtaggggctgcagggacaaacatcgttggggggtgagtgtgaaaggtgctgatggccctcatctccagctaactgtggagaagcccctgggggctccctgattaatggaggcttagctttctggatggcatctagccagaggctggagacaggtgcgcccctggtggtcacaggctgtgccttggtttcctgagccacctttactctgctctatgccaggctgtgctagcaacacccaaaggtggcctgcggggagccatcacctaggactgactcggcagtgtgcagtggtgcatgcactgtctcagccaacccgctccactacccggcagggtacacattcgcacccctacttcacagaggaagaaacctggaaccagagggggcgtgcctgccaagctcacacagcaggaactgagccagaaacgcagattgggctggctctgaagccaagcctcttcttacttcacccggctgggctcctcatttttacgggtaacagtgaggctgggaaggggaacacagaccaggaagctcggtgagtgatggcagaacgatgcctgcaggcatggaactttttccgttatcacccaggcctgattcactggcctggcggagatgcttctaaggcatggtcgggggagagggccaacaactgtccctccttgagcaccagccccacccaagcaagcagacatttatcttttgggtctgtcctctctgttgcctttttacagccaacttttctagacctgttttgcttttgtaacttgaagatatttattctgggttttgtagcatttttattaatatggtgactttttaaaataaaaacaaacaaacgttgtcctaacaaaaaaaaaaaaaaaaaaaaa

SEQ ID NO: 2 - DNA, 32000 bp, Homo sapiens
  source 1..32000: mol_type = other DNA
gtgaccatgagcggtagttgccagtggtattcacaaatataccctttctcctccttctgggcacttggtgtgattgcagtttcctacatttgaccttaggtgtggtcatgtgtctcgcttaggagaaggaaatgtgaacggaagtgttgtgggtcacttttgtgtggaagctgcatggagtcacctctttgctttccgtcagcctcagtgttcagcaatgttctgaatgatggttgctttatcagtctggttctggggtgagggtaatgaagtagtgaagcaaagtccttgatggacatgtgaggtgagacagaaataaacctttgacatttcaagcccctgagatttggggcgtgcatgtgctggaagcagaacctagcctattctgatggattcctccagcactgctcgtgggaagacatcatcaatatagagcattcatgtgccctttatctcgaaattccacttccaggaatttatgaaacagatactctcacatgtgcaaacagctatggataaggacagacatggcaacttggattgcaatagcaaaagacagaaacaaccaacggaaacaccaaccaataggaaattggctaaagacattgtgaaacatacatagaatgaaataatctgcaaccagaaaaataaggcagtagatgtatgtgtaccagtgtggtttttattccgagattagggctaggttaagacgtcagattaagttgtccctctccaccccaccaatataaataaaaagttaaaagtaaatcataaactatttttacaattttaaaaagtgggttaaagagcccatccaagtagttttataaaagtagactatctccgaaaagatacccaataaataggtatattactttcctggggctgttataacaagtttctacaaatttgctggcttcaaataacaaaaacgtattctcttgcagttatggaagccagaagtatggaatgaagggttgcagggtggtgccctctcccaaagctctaggggaggaacattccttgcttcttccagctcctttgggggctcctggcattccttggcttatgtcggcacagctctaatcggcgcctccattgttacataggtgtttctgtgtctcaagtatctctcccctttctcttctgatatcagtcattggatttagggaccatcctaaacccaggataatctcctcatgagatccttaggtcaattacatctgcaaagatctcatttccaaataaggtcacattcaaaagtaccaggggttagtcttagacttatctttttgggggacacgattcaacccactaccgtgggtaacagtggttttccctcagaaggtggtggttcaggagtgggaggaagatgaacttttcactgtatatcctttcaaactattcacgttttaaaaaaaacattttcatgtaaatttaaaaaaattgaacattcacacaaaaagatgccccctcccttgcaaaaaagagtatgcccgttcaaaatgttgaaatgtacactcacagcaatggtggctgcagactccaagtttctgaggttggagaaggtagccagggagcataaaagtgagttctatctactcattcagtctatgaggggaaggcaatggctagaaaagcattttgagggacagtaaaagtggcatttttagagggaggaagccttgaggatgcttgtggggtgaagggaaagaataactcaggaagaggcatttagggataagaggaggagaggagatagtggaggtaggtgatccctgcggaggccagattggggcaggggagtgtcagctgagtataagaggatggtcccctctgccctgaaggaggaaggcaggaggggaaaaggatgggtgttgacccagaaagcacttgtggtggaggggaggccccagaagaggcttctgacttaccctgattgctggtacctctcaggggagctggctgcttatttgctggccagggtgtgggggaacccatttgagaagagggagaaggtgacacaattcctttgggcaacttatgggaggggtaattggtgagggatgaaagccctgccaagtggcaggaggcccagctggggctgcccctcataagagtgcagtggaggatatgggatgagaagtgactgcccctctggttccatctgtcgcagagcccagggtgcttccttcctcccccacctccctcagaacacacccactgcatgctggacagcagcccccttcctgggcctggggacatccatgtccctctgtgcacaggcttcatcattctctgggtgcacggtaacgaccccggtaggtgagaggccaaggtcccaaaggggagcagcagggaaagttagctcccatctattcttgctccaggggaggcctttgatgaggaagctgccaaaagcacattgcaaatacaattccaattacaggcaacaggaaggagaaccacctctgccacctctgtcagcaaaccatgagctcctactctgtgctgcgatggcgggctcgatggggataactctgaccttacctcatggagtcactgtcaacccactggttgcactgtctttgtgcactggctctctggagtgaggtctttgcaaacaaagtggaaagagcatcaactttggactccagcacctagattcagagcaggccatttcactcggaatctgctgtgcatctgcaagggaggatcataaattcgcctttgtttcttcccagtatcgacagcccttccagaaagagcaagcctcatgtcatgccacatgtacaatctgaggccaggagctctctttccccttttcatcctcctgcctggtacacaataggtgtttactggatgcttgtccagttgatttcttgaacatggtgtgtaaaaggaatctttgcaaattgaatcttctggaaagctgagcttgtgcctaccatagaattctgaatgtacctatatgacgtctttgcaaacttaaaacctgaatctttgtagtataaatcccttgaaatgcatgtaggctggacatcaaaagcaagcaatctcttcaaggagcagctagttggtaaggtcagtgtgcagggtgcataaagggcagaggccggagggggtccaggctaagtttagaaggctgccaggttaaggccagtggaaagaattcggtgggcagcgaggagtccacagtaggattgattcagaagtctcactggtcagcaggagacaaggtggacccaggaaacactgaaaaggtgggcccggcagaacttggagtctggcatcccacgcagggtgagaggcgggagaggaggagcccctagggcgccggcctgccttccagcccagttaggatttgggagttttttcttccctctgcgcgtaatctgacgctgtttggggagggcgaggccgaaacctgatcctccagtccgggggttccgttaatgtttaatcagataggatcgtccgatggggctctggtggcgtgatctgcgcgccccaggcgtcaagcacccacaccctagaaggtttccgcagcgacgtcgaggcgctcatggttgcaggcgggcgccgccgttcagttcagggtctgagcctggaggagtgagccaggcagtgagactggctcgggcgggccgggacgcgtcgttgcagcagcggctcccagctcccagccaggattccgcgcgccccttcacgcgccctgctcctgaacttcagctcctgcacagtcctccccaccgcaaggctcaaggcgccgccggcgtggaccgcgcacggcctctaggtctcctcgccaggacagcaacctctcccctggccctcatgggcaccgtcagctccaggcggtcctggtggccgctgccactgctgctgctgctgctgctgctcctgggtcccgcgggcgcccgtgcgcaggaggacgaggacggcgactacgaggagctggtgctagccttgcgttccgaggaggacggcctggccgaagcacccgagcacggaaccacagccaccttccaccgctgcgccaaggtgcgggtgtagggatgggaggccggggcgaacccgcagccgggacggtgcggtgctgtttcctctcgggcctcagtttccccccatgtaagagaggaagtggagtgcaggtcgccgagggctcttcgcttggcacgatcttggggactgcaggcaaggcggcgggggaggacgggtagtggggagcacggtggagagcggggacggccggctctttggggacttgctggggcgtgcggctgcgctattcagtgggaaggttcgcggggttgggagacccggaggccgaggaagggcgagcagagcactgccaggatatcctgcccagatttcccagtttctgcctcgccgcggcacaggtgggtgaaggagtgaatgcctggaacgtactgggaactgcaccaggcacagagaaagcgggcttgccattatagtgggttccgatttggtttggaaaacatgggcagcggagggtggagggcctggagagaaggccctacccgagacaggggcggggtgggaaggacggcagatgctgggagcacgaggcaatttctttatgacacagaactcatgctctagtattccatctgtttcagccgaagaaaagaaccagctgaaggggcaggggagaaggggcggaggtattctcgaggcccattggcgtcctttaggactcaggcagggaagggcccttggtgctctggagccggaggtggtgcgcctggtactgggaccccggagctgagcccggcgcctcagcccacctggctgtctgccgaccgtgtgcggggcgagtttgctcaacaactctgccagcttctggccctcaggctgtgggaagcttcttcccggggcgagaccactagctttttctaagtattaccagcccaggacttggctgaggttctgtgtcccccagcttggagtcagatgtggggttgaatcttggcttcctctcactagctgtggtgcttgacaagtcacttatccttgagcctccattgcctaatctttaaaagggaggtgacaatcgtccctacggctcagtggcagcagatggggagatgaagggaaagttctgttgaccatgagtgaacttacaatgcaagccccggggggatcacttgcagttttgtccctgtctgcagtgtgacctgttggtgacattgtctttgctccaaaccacagctcctggggcagaggggaaaattctgccactcacagctgcctgcccacgcttctgtctgagtgtgctgggtggcaggatggcaagtccttactcagctcagtatagccctcttccttgttccctgagcctttgactttctcgagggatgttgtggggttgtggccaggataagaaagggcatttcaagttaccactgctccaaaacaactgttctggaaatagtgagtaccccatcctgagaggtgagtaagcagaggctgtatgaccacctgaaccaagcccttgaggatgtttcttctctggtggaagtttggaacaggagcctcctcaagttcatttattcattcattcaatggttattttgtgggaatcgaatttagaatgaaaatattttttggcaagcagaaaataatttttagaccaatccttttcttttagtcatgagaaactgaggcccagagagaggaggtcaccccaggtgcattagaactgggtttccagaactgacactccactgcacagagtactctcccaattcattcaatttttatttagcggaaggcattttcagatgggtctttgaagcattagtaggagttcagcgatgatggtgtcatgagaattttattctaggattaggaggtaccatgaacaaagatacagagctgggaaaaccagaggtggaagataaggagcacatgtccacagttctttttcttttttttttgagatggagtttcgctcttgttgcccaggctggagtgcaatggtgcagtctcagctcactgcaacatctgtctcccgggttcaagtggttctcctgcctcagcctcccaagaagctgggattacaggtacctgccaccacgcccggctaatttttgtatttttagtagagaaggggtttcaccacgttggccaggctagtcgcaaactcctgacctcctcagtggatccgaggaggtgatcctcccgcctcagcctcccaaagtgctcgaattacaggtgtgagccaccacgcctggcctccacagttctttatccaccgtctgaaatgtaaaatgttacgaaaaccaaaagttttttttgtgatttatttgatggtagcacctgacgtgaactgacatgagattatttttaatttagttgtgtgaatatgcatattcatatattttgctgcatagattacagtatgcagctccagattcttccaagcagactctgattgcccattactgcctttctaaaatccaaacaagttctgaggttcaaaaccgttttggccctaaggctttgggtaaagggggtggactctgttctactctgactggagtccaagatgcatatatacagagatatgggtgatggggctgcaaggtaggttgaggtaggggccaaggaggagcatggagtttggacttgattcatgaggctgtggggagccagtgaaggttcttaagcaggtatgtctgcctgagagcagttggagcagacaagagctaaaaaccaaacaaatcaccatagatagtggctgctataatttgtttgtcccctccaaatctcatgtggaaatttggtcctcagtgttggaagtggggcctaatgggaggtgtttgggtcatgggggaggaacccctgtgaaaggcttggtgccgtccttgtgataatgagtaagttctcccgctatgatttcccttgaaggctgattattaaaaagagcttggcacctccctctcttctctcttgcttcttctcttgccatgtgattgatctctgcacatgtaggctccccttcaccttctgccatcagtgaaagcagcttaaggccctcaccagaagcagatgctggtgccatgcttcctggagagcttgcagaatcatgagctgaataaatcccttttccttgtaaattactcaccttcaggtattcctttatatagcaacacaaaaggactaagacagtggccttgacttttctctctctttaagaagtgttgcctttgctcacttagtcatcccttctgcctgcatttgtagagcatctggatgggagatttatataaccgtcactcttgactttcccagcaggcctatgtcataggtactgtggtctctacaatacagcagaggtatctgaggctccgagaggttgagtgacttgctcatggctgcacaaccagtaaatattggagctggaattcaggtccacggtttcctggctccaaagcccatgattttttccctcaatttattctgactggggcatgggggagggggtggcctttgggcagggccaccaggagcgaccaggcccgtagagagctgggtgcaggtacagaggaaaacctgttgtcgagtgtggcccgtagttcccatttttgcctgaatggcacatttgaaagtgttatataaccatgtgaataataatagttggcctatatgagttctttaatttgctttttggtccgcatttggtaacttctttatcatctactatactctgttgtgtctcttttgttgtaatttgtaagtaggggtgagataaagtacacctagggtttgctgggtttcttccatgtcatcatgttcctccttgcatggggccaggatccgtggaggttgcctggcacctacgtggtggtgctgaaggaggagacccacctctcgcagtcagagcgcactgcccgccgcctgcaggcccaggctgcccgccggggatacctcaccaagatcctgcatgtcttccatggccttcttcctggcttcctggtgaagatgagtggcgacctgctggagctggtgagccaccctttttgggaatggcacttcctgatagggctgggccactgcatatacactggggactgtgcttagtaggcccattgctgaaaatcagaaggggacagcaagtatgtattgagcacttatcgggtaccaagcacagtaactactggctttctgtatagaattccctttaagcctggccatgccccagtggtacgtctatcttcatttgaaagacgaggagactgaagttcagaggggaccacacagacagctaggggtagagcctggatcaaacccattggtctgcctgccagccattcttgtgccaatgcatctgctgcctacggaaacctgtagggacaaggccctgggatgttcagtggagcctgagtcattttataaaaaagcatgactctagggtccaaaattcctttgaagctgttgctatccagagtgaagtcccttctttaggacagggtggccctcctccctcctggatgtcacatcttcggtggaggggcagaaaggggactgggtattctcctcaccctggccctagtgcttcaaatcttaaaaaaacgtttttatttgtgcttctgcaccaccttctagcccacctcgtttcctggcctctaacttgatgagagcgtgtgtcattttcacactgattctccacatggcaggcggtgcttcttagcctcctgcagacagtgaggccccacggtcttgtccaaggtcacacagcgtgtaatgggcagggtcagagtctggagtctggacctgggtctcctagctgcactgcactgctgccccatgggttaatcagctcagcataccgtggctgaacagctacctcataccaaggcctgtggcgccatgacagggattgacagggtccctgccttggaaacccgtagtctaagtagaggagactgacaagtcaatgccttccatcagtctgctcaacacacgtttaccaagtgcctactgtgtgctgcagaggcgaagatgacacagctcaggcctttcccttgagcttacagttcaggaggagagactgaccagtgactgccagtacagttgactatgggacaatgtgctcagccttggggagagacgaagaaggtacccgtatagcaccagatgacaggcacgagccccacaggccagggcagctgctcagaggagagtaggccaagcagaaggcaaacagaaggctgcaggcatttgccatcgagagctggacttcaaactgggcatcataccagcctgggttcgagtcctgcccagccccttattggctgtctaaccctgagcaaatcccttcacctctctgagcctcattcctctatctgtaaaccagttataataattggaacattcatttaaggactaaatgaggtcgtgaagcattcagcagatgctaggtacggaaactcgctgaagtgggggcaggttaagaagcctctggggatacgaaggcatccagggactagttgtggcaggaggctgttaccacttaggtctgaagggtaaggagagggaatagctttccctctgcccagttggagccggtggcatggaggagaggctgcctgtggggaatcacccgagggttcaccgctgccatgcgcagggagtcaggaggtagggagggagtggggcagatgcacaccatttttttttttttttgagactctgttgcccagactggagtgcagtggtgccatatctgcacctctgcctcccgggttcaagctcactgcaacctctgcctcccgggttcaagcgattctcctgcctcagcctcccgagtagctgggactacaggtgtgtgccaccatgcctggctaatttttgtatttttaatagagatggggtttcaccatgttggccaggctggtctcgaactctcgacctcaggtgatcccccacctcggcctcccaaagtgctgggattacaggcgtgagtcaccgctcccagctgctgatgcactcttgtccttctaactcctgctagtgcctcccattggctgagcccaactggaagctttgcaagggagctggtgctgcagtttgcactgagcaggctggagaaggctggagaatagactaggggacaaaccgaattgccagtgctgttatgtcatgatttaggcatggagtccagggcctgagcttcactccatgtccatcctgcccagagccttggcacagcctggctcccagacaagatgtcaagttcagaatccttcctaaaaggaatcctctatgccagaccgtgttgcagggatatgggagtgctgggctcccagcctgatcaaggagcgagaaaactcaggctcctagtctgtcctccggggcactagcagggacaaggtgggaggctgctgggctgggatgtggggacaggtttgatcaggtaaggccaggctgtggctgtgtttgctgctgtccaaatggcttaagcagagtcccccggcctctctggcttctgcaggccttgaagttgccccatgtcgactacatcgaggaggactcctctgtctttgcccagagcatcccgtggaacctggagcggattacccctccacggtaccgggcggatgaataccagccccccggtaagacccccatctgtgccctgccccaccccatctgagctgaatccatttgctctgccctggcctggcctccctgctggtggtttccacttctcggggggctttgggactcagcacctccactgacccctttttttctgtcccatccccatcccctgcagcccccactgcctgccttcctgttgccccacaaatgcaaaagtcttgccttaaatgatcctcttttccttcttttctcttgttttccttttctcaccatttggaatggcccagcaggctgcacttaccttggaaggagggttcatctgatggtgactctacctagggcccccaggcctctataactcccagtgccctgcagactggaccagatcctttaatgggatagacacaaccctgtctgggatgcctctgcctaccttcctgttttgctgctccacctgcctccagctccgtttggcttcctggggctccctgcctgggccactttgtgtcttccctctaggcctttctttccactgttccctctgcctggtgtggcctggctatggaagggagggaggaggagcggccatggaaaacggtctgcattctagcagggacttgcaggtggcaattcagtcggggaagactctagatgcacctggcctgaggagagaatgaagggttctagttggactgtgttaagtttgaggtgcccatggtgtgaggtctggagctcagcgcagagatgatgcaatgtggtgggtccatgcaacatggtgccaggacgcagagcttggggtgaactcagctttcaccccttaccggttctcgtgggatcttgggaagccactttcttctatgagctttgtcgttcttgtctgtaaaatgggcacataaccctgtccctgtccttctcacaggttgctgtgagactccaatgagttgaaggatgtgcagatgcttttggaagtgaaaagttggggggctactgtgtgactttgcatacacccaaactgtgtgaccttgcatatgtctgagttgctgccattgcaacagatcagagctggtgggctgggtgtggagaaagggtttgtgtgggggacatcctctggcaagggtggcagcagcagaagtgaggggcctggtcggtcatgtgtgctgacccggcctgggcagcctgtggccagggagaggacagctcctctgtaggaagagcctgttcctttccaaccaggtgagacctcttcagtggagccctggagccccctgtactccacatcagtgcctcagggacctcccggagcaggctaatatcagagaccaagagggacactggcagaggatcacagagaccccagtccaggcagggactgagaagatcttgccccctaagttagtttcctagcactgctgtgacaaattaccaccccctcggttggaacaagttgattctctgcagtcctggaggccagaagcctgaatcagtgtcggcaggaccactttctcccggggggctccagggagaagcttctcttgcctcttccgtgtcccaacagcggcagcacaccaatcccagcctctgtcttcacacagccttctctgtgtctctctcctcttcattgtctcataaggacacttgtcattggatttagggcccactggatcctccaggatgatctcatgtggggaaccttaaccacatctgcaaggaccctttttccaaataaggtcacagccacaggttgtgggggttaggatgtgagtgtatctctttggcagccactgttccctcctctcccttgggccagaagcagacgtggggccctttcttccccataggatgcccatggattgccccccttcccgcttcccccgagtgtctgtgggaggtggcaggaatggcaggcaggggtgtggaaccccttctggagtcatatcaagggcttggctggaggaagtcctcctggagctgttgggctggcatggggcaggctggctgggcccagcagcagcttcttcattcatggggaggccacaagcatgggccctagagctggctgccgccctcaaacccagaccctgcactcttaactgtgtgaccttgcatacgtcactcaccctctctgatcttcaggttcctctgcaaaagggaggtaatgataaccctcactctggggggctgtttggagggttaaatcagttattgctgtagcatgcatttctctgtcaggtattgagtgaggtgctgtgattttagccctgcatttttcttttcttaccattcaataataacgttttgagcacccactgtgcgccaggcaccatattaggtgctggggatacaaatgtgaatgaaatgaatgtggtctcttcccccaacagtgtatccagaagattaatccattccttaaacaaatgctacttgacacagattagttctggataggctgagagctctgaaggagtgcaggcagctgcgagcctgtgtatccagcagaaggatcaggaaaggattcctggaggaagcgctgttctagccaagacctacgggggcattattaaccaggcaaaggggacggtgtccaagcagtggaatgaacgtggattgaagctgtgaggcaggagggagtgtggcctgtgcagaagggaccgaggctggtgagaccaggagggcctgggtggcctccaggtcagatgtgaaaggaagaacttggccacagtctgagcttctcaggcgtatggcagggctgcctggtgagagggaatgagctccctgctctggaggtatgcaagcaggactgggctctcacctgccagaggccacagagctttccagaggctggaagaggccactccaaggcctctttgcccctgagagtggtggctcttcttgaggccaccttgccacgctgtcacagggaactagcagcccctgcctcacccgggggtttggaagatagagggaggcctaggaagggccctgtgtctcatccgagctgggcccctttccagcctctcactggaaggaagcccaaggatgttcctgtgggggcttttaccaggcccacctgccctctgctggccatgcttgcagcctcctgaccctgtcccagcaggacagtgggctggtgtgagcgggcaggaaccgcctgcacttagaaggtgtggggctgcctccccgagcttccatctgccgctggggccacaccccaggcccagggatgggaccccacagtggtcacatcatcttgcagcagaacccaggtacagctcctggagcagatggtggtcccaagcacgggtgggaccagaaaggactctcacctgggctaactcagctgcagcctcagttccctcctcacacacgacgaggaacatggactggaagcctgcccagcaggccttctgctcgatgtgcgttgtgtggcttacgtccagggagggaagcagcctctgtgctgtcttctagataagcctgtattccccgggctgtctgccaatgtatccagttgtcccgtcagcctggaagctctgagggaaaaccttgggctgcttcctgagcacctgtatcccctgcagccagcccggggcctctgctaggagcagactgagcatggcttatgggcctggcaccatctggcctctgcccaccttgctggccttgtcttgtgtctgccccttcgacattccatagcccagctcaatatctagtggttcctctagggtggcgagcactgtttggtctccagatgtcttcaggtcggagctcacagcgctctcagccaccccttcccagtgtagcaccgggcacatggtagatgcctattgatgagtgaaagctcctaacacactcagagagcaaggactccgcctcatcccacagcctgggaggagaggcagactgccaaggacctgctcagcatgctacagaagaaaccaaagtgcccacgggactgatcagtggagcttcctgccgagactggaggccttagggcagggtagacagtgtgtgtgcaggctggggactcacagttcggactgtgcccagacctactagcatagtgggtgggtgggaggatgcgggactgggggccgaccttgcctgaaattcatgtgggatctcagagcagccactgaattgctctgtagggggctaaatagtggcccccacagatacacacacccagacagagcctgtgagccagaccttatttggagaaaaggtctttgtagatgtaattaagcatctcaagatggcatcatctggattatgcggtgggctgtaagtcctgtgatgtgtctttatgagagaaaggcagagggagatttgacacacacaggaggggccacgtggagacagaggtggagattggagaaatgtggccacaagccagggaacaccagcagccaccagaagccggaagacgtgaggcagggttcttcccagagccttcgctgctgagtctgggaatttgtgaccgaagccataagaagtgggtacacgccctgagcctcccacacttgctcacctgtcctgagatgagaatctctactctgcagcatatttggaggatcactgcgggggccacagaggtgctgttcagatggcacttcagaagactcaggagaccctggggcaggagcagtttgactgacagcccagagggctgccctctgattccacctgaggccctgcttttcctggctgcaggggttccagggccaggccatttccgctggcgcaggactctgctagcagcaacctgcctgaagtcttcctttggcctggctgagagtttctgagacctgcgctggagcggaggtgcttccttccttgcttcctttcttcctctctcccttctccatccagcaggctggacctgcctggcatctgtgagctctccctactttctcctataccctaacctttgtcctgcatgggcgactcccccagtgagtctcttgcagcttttaccccagtgcctgcttcttggagaatccaaactgatccagttagggatgataaagtgtagggtaggcgctcggtgactgttttctctgaggttgtgactcgtgtgaggcagaagcagtccccgtgagccctcctggtatcttgtggagtggagaacgcttggacctggagccaggaggcccagacatacatcctgtccgagctgcagcttcctgtctctaaaatgagccggccagcgcaggtggccagacatcactgttattctcctttgagtctttaaatcttgttgtctttcttgcagactcggtgagctgtgaaaggctataataggggctttattttacactttgatactattttttgaacattcatattattgttagatattgatattcatatgaaggagcaggatgacttgggtccttcttggcagtagcattgccagctgatggccttggacagttacctgccctctctaggcctccctttccttgtctatgaaatacattatagaataggatgtagtgtgtgaggattttttggaggttaaacgagtgaatatatttaaggcgctttcaccagtgcctgggatgtgctctgtagtttctgtgtgttaactataaggttgactttatgctcattccctcctctcccacaaatgtcgccttggaaagacggaggcagcctggtggaggtgtatctcctagacaccagcatacagagtgaccaccgggaaatcgagggcagggtcatggtcaccgacttcgagaatgtgcccgaggaggacgggacccgcttccacagacaggtaagcacggccgtctgatgggagggctgcctctgcccatatccccatcctggaggtgggtggggactgccaccccagagcgttgcagctgtactcctgggttgcaccccccccagctgtcactgtcccctccctgccatcagttgtgggaagggcgttcatccatccagccacctgctgatttgttatagggtggagggggggtctttctcatgtggtccttgtgttcgtcgagcaggccagcaagtgtgacagtcatggcacccacctggcaggggtggtcagcggccgggatgccggcgtggccaagggtgccagcatgcgcagcctgcgcgtgctcaactgccaagggaagggcacggttagcggcaccctcataggtaagtgatggccccagacgctggtctctctccatctggacctggcctgggaggtggcttgggctgggcccagggagagctaatgtctcctaaccaagaatgctgtggcagcctctgccgcagagccagagaaccagagtgccaaggctggcagggttcccagtggccacgagtgcagatgaagaaacccaggccccaagagggtcatgcaggtagcccagggagttcagccttgaccctgggtcaatgacctttccacagttccacactgctccccttttaaaatccggtgatgtctttatgtcttttgttatgttatcttcaatgtggagggactcgaggtgatctaagcaaactttttctatcttctgcttgcatacctctgagaccaggggactcactcacttgcatgactgggccctgcaggtcacactggccaggcagatgtggtggaggaactggcagaggactttttctagactgtgactacatttagtccacccagcggcccccctatgaagtccagttgagaactaggactctgggggccggtggacagagaagagggagggttctctcccttactgacttccttctgtggccagacattgagcaaggcctctgtacagcatgtcctggggctggccttgccgtagctgctaaatagttgacgaaaccagtccagagaggggaggtgactgccagggtcgcacagctcaagctggggaactcgctgggaaaactgtcagctctgggcagcagcttgacttccactgtaagccccagcccccagggtcaaacactggctctggtgctggcagaggcagcccactagcctgtttcaaaggctgagaaggcccaggagtctgccctgtgctccaccagttctgccctgagactttcctacagagtacaggttttgatgttcagttttaaaggcaagaatcaataaccttctgccccatcaggtgaccccttgtgcctgtcccacccctttattgactgacctcggctcagtcaggtcagttcctgaaggtcagtgtgtggaggggaggctgttctttcccagaaaggccttccccaggcctggtgctctggcctctggaggacttcctggagaagtcccttctttggggtcccagtcagtgtatgggaagcccttattgcatgacctggcacggggcaggggctcaacagtcactattgccttccttgccactgccatttcctcctctgtaagcaggtgattgtgtgtccagtctgagcacagagataagcacacagcaggtgcttaataactagcagctgtaggctgggcgcggtggctcatgcctgtaatcccagcactttgggaggccgaggtgggcagatcacctgaggtcaggagttcgagaccagcctgttcaacatggtgaaaccccgtctctactaaaaatacaaaaattagccaggcatggtggtgggtgtctgtatcccagctacttgggaggctaaggcaggagaatcgcttgaacccaggaggtggaggttgcagtgagctgagatcgtgccactgcaatccagcctgagtgatagagcgagattccatctcaaaaataaataagtaaataactagcagctgtaaatgtggctgttgttcttcacctccacactcagtgccactccactccctccctccgtggtgtgaggggcctcactagctgtctcctaggaggagcatggctgtgagattccagctccatccttggccacggctcctggagacatcttagaggccaggatccagaaggctcccacacctcatttgacaggggagaagctgtcagttccaggtccccttgcacatcagggccagagctgcgttaggcctccagtctccaggccactgggccagagctcacaggctggcagagggttagaactgttactggtggctgggtgcagtggctcacgcctgtaatcttagcactttgggagggcaaggcgggaggatcatgaggtcaggacatcgagaccatccttgctaacacggtgaagccccgtctctactaaaactacaaaaaattagccgggcgtggtggcaggcgcctgtagtcccagctactcaggaggctgaggcaggagaatggcgtgaacccgggaggcggagcttgcagtgagccgagattgcgccactgcactccagcctgggcaatagagcgagactccgtctggaaagaaaaaaaaaaaaaagagctgttactgttgacagtagcatgaggtagaccatggcctgcaccaaaatgggggagtggagtgccactgaggccagaaggaaccacaccctcaagggtggggagttatggtatggggggtcctaggcatggagtcttttaattctttagacaatcctgggagcaactgtccctgtttcacagagggcggggccacacagctggtgagtgggcagccaagactctgttcaagtttgtgtgggtccaacacttgcggccacggtggaggggcatctgagccaggcctcagagagtggcgggggaagttgggtggggaagtgtgcccttctcattcctctgaggctcatcctcttggtgcctctctttcatggaaagggataataaggttattgtgaggatcccctgagttcgtatattcagacgcttagacagagccaggcacagagaagggcccggggttggctagtttgattgctggtgtaattgctaatatcttccagtttgtattggtcaaggttctgcagagaagcagaaccagtaggatgtatatattaagagtttcaagctcatgtgaccgtgcgggctggcaagtctgaaatccgcagggcaggccaggcaggctggcaattcctgcagaatttgatgttgcaatactgagtcctaaggcagtcctggggcagaattccttcttccctgggaggcctcagtctgttctcttaaggccttcaactgattaaatgaggcctgcccaagttatagagagtaacctgccttactccgtcttctgatttaaatgttagtcacatctaaaaaatattttcgcagcagcatttccactggcttttgaccaaacatcaggccacaaagttgatccccaaaattaaccatcactctgtgcctgtaagggaggggctgggaaaggggagcaggtctccccaaggggtgaccttggctttgttcctcccaggcctggagtttattcggaaaagccagctggtccagcctgtggggccactggtggtgctgctgcccctggcgggtgggtacagccgcgtcctcaacgccgcctgccagcgcctggcgagggctggggtcgtgctggtcaccgctgccggcaacttccgggacgatgcctgcctctactccccagcctcagctcccgaggtaggtgctggggctgctgccccaaggcgcgggtagggggcggagggcggagggcggagggagggcgggcgggcaggcgggcttcttgtggcacgtgggcttcttgtggcacgttcctggaggccgaacccttctggctttggaaggagtcgtcagagacccccgccatgcgggaggctggggaggaaggggctcgaaacctccatcatcgcagagtctgaatagcagtggccccgccatgcgcccacgtagcggcgcctacgtagccacgcccccacaccccgtcctggccactctccctcctgaaggtcttctggtacccgccccctccccatctccatccccaggccctgcgtcctctgcccaatactctttgggcctccctgttgtccagctctctccgcggctccatgactgacaacttgagcaaggctaatgtgaatgggagcggttgagggctcagacctctcacccgaggaacatccacagagtgtgccgcatgcccggtgcagtgtggctgcggggacacagacacggagcctcggccctgaggagctggggggcagtgaccgtccctcctctgacccaccactcctccagtgtcaggacactgcgggtatctaggggaaggaatcttgttccacttcaagtctggaacttcaagtctgtgtgtgtgcgtgcgcgcgcgcgcgttgggggtgggggttgcagagcagatgcgtacctgacagcggtaacctaggtcccccctggcctatcaaggcttccctggcggccgaatttaaaggcatcaagcaaacaaagcccaacacatctctgccttgtcctctcagtttccccccgtggcacttagaaccacttgatacaccgaatagtttcctatctcccccactaggatgtaaactccacaggggcattgggaatgctgcctggctatggtagggacagaggggagcaccagggcggggcaggggtgccagagttctgcctgggcagtcagattttccttaggaggggacatttgagtgggacccaaacaggtgtatagcagttgtccagcccagctggcaaggcctgagtctgcctctgcaacccctctcttgggctcctttctctgccacccacctcctcacctttccaggtcatcacagttggggccaccaatgcccaagaccagccggtgaccctggggactttggggaccaactttggccgctgtgtggacctctttgccccaggggaggacatcattggtgcctccagcgactgcagcacctgctttgtgtcacagagtgggacatcacaggctgctgcccacgtggctggtaagtcaccaccccactgcctcggccaccgtgatgctaacagcccctttggcagtcagggtctgtgccgggacctccagtgccaggctctgtgcagggggaccagagatgaagtaggcctgatggtgccttcaaggacactcagtctgatgagggaggcgagtgcacagaggaaacacgaggtcagggctgtattagagggagcccagaggaggcacctgcccagcccgagggtcagagaaggcatcttggaggagggacatttgatcgggagcttgatggatgaataggagttcacctggccgataagacagcaactaccaaggcttagaggtgtgagaggaggctgtcttacctcactgagtaaggactgcaggcggcttaccttcgagaagagagcttagtgtctgtgtgcacgtgtgtttgtgtgtatgtgtgtgcgtgtgtgcactggcaggagtcccctgctggggcaggagggccgggccatcaccatctttcaccattcacccctgcaccaggcattgcagccatgatgctgtctgccgagccggagctcaccctggccgagttgaggcagagactgatccacttctctgccaaagatgtcatcaatgaggcctggttccctgaggaccagcgggtactgacccccaacctggtggccgccctgccccccagcacccatggggcaggtaagcaggatggcagggtgggcaagtccaggctggggcttgggaggtctgtgtgaccttgacagtctctcccttctcccttgtctgtgtaaggaggatgacgccaccttaaataggattaaatgagaatggggctctgaaagggctgtgcaatattttcataacgtgtttttatagagacagttgagtatgttctttaagccctcctctctcctaccatgaactaaagatttctgtggaggtcccctcactcccagcaccccctcctcatcccaggccctttttgcaggttggcagctgttttgcaggactgtatggtcagcacactcggggcctacacggatggccacagccgtcgcccgctgcgccccagatgaggagctgctgagctgctccagtttctccaggagtgggaagcggcggggcgagcgcatggaggtgactgtacccctccttcgtgtgtgtgtgtgtgtgtgtgtgtgtgtgtgtgtgtgtgtgtgtgtgtgtgtcagtgctgggccctcagggacccccagcaagcccctccatcctccagactccagctcttctgtaagcttacagggctggccagaccaggagtggggcactcctcacttcacgcggctgggggctgctggagagagccacagcgggaagggtttcctagaggctgcaggacagtgctggatggattttcaatgctcacctgggtgtgagcgtgcggcagggccgcgtgagggtcagcgatctgctactctggactcagccatctctaggcccctctcactcaggtgctccatggttctgggagctgagaaatctcaaaccagcaaaaaagtggaattgatgttgatgctacaggatagtgcacagatgccatctggttgcagcattttggtggaagggcagtgcccagctaggagagtgaggaggggcaggcatttctggcttgaggagatggggtcttaatgctcgtgtgagaggcagagtgggtggagtggagctggctggatccttgctttggcctcctggatttctctctatctccattttgaaaccactctgtgtttggaagaacttttgagtattcagagctgcccactggcagaacagtcttccttgggcaggagtgagctccttgtccccagaaggctgggtctggctggcccctggcagggacactgatgagggtgcttgagttgatcctgtctagtccctttctgtgttttcaaagcccattctaaagcagattcccatttccgtctttgactctaaggcccaagggggcaagctggtctgccgggcccacaacgcttttgggggtgagggtgtctacgccattgccaggtgctgcctgctaccccaggccaactgcagcgtccacacagctccaccagctgaggccagcatggggacccgtgtccactgccaccaacagggccacgtcctcacaggtaggaggctgggcttgccctggggtgaggaggggtctctttctccttatgcacccactgcccgcgaggcttggtcctcacaagtgtgatccatgagactcaagcctgacttgcagttccatactctggttctgccacttccatgccctttgagcctgggcaggtgaccttacttctcctcatctcagcttcctcctccataagagggaaaaaggtattacctgcctcattgtgttgcaaggagatgggcagcatctagggcactggcctggagtatcgcaggtgctttgcctaaggtggtgcagtccaggagaggcagctccagagagaggcccccggctggggctgaaaggagggcagacctcggtttgaatttcaccctgccgctctatagctgtgtgacttgggcaaattacttaacatctctgtatgaggaaatgatgagtgctaagcacttagcttagtgccgggacaatataaattctagctatcgttactattgttttcatcacccgttgctttaaaatccagcctctggtataggcaactattgacgggctaccctgtgtcgaaaacatgcccaggcaggtagcaggaagtcacagatggggacctcttggggcatcaagggatggtgccctgaggctgagctgttctggttgggtggagcatgagaggtctgggaagacagtgggactccagcctggaataagaggctcagagttgattctcgtctgagcacgtccaggggaaccactgagggtttgggaacaggagagtgagggtgagaacctggttctgggcacagcaggctggcatgtaggatggatgttcaggaaagatgagcatagtcaggtggctggtgcccttgtccaggggagaggctccgtcaggttcaggggtcctggcttggagggaagtccgccatgctctaatcacgctcccctttggaagtgctcagccgatgagctcacaggcacatgtcagtttgaagtcatggaatctgactccatgaagcgcacctcaaagagcaccattttgcagctaagggaactgcaggctggacatgctgagtggctgccccgagcccttgcagctaggacatagagaatgctagtaaccacaaccctaccatgttcagagcacatgccaggctccatgctggggcttcgcacgtgtcatcttcacagtgtccctgtgagtaggtgtggtttctctttccatcttacaaatgagtaaacagagcctcagtgtagctaagtaaccactattttaggtttcttagccaatgggtgtgtctgactcctaagcccatggagggcattctgaggtggttcagacagaccccggcttacccttgaacttctgcctgctggctgcatagggaggggctggggggagtttgagcatctcaggccatagagcccctgcctcactgtctccatctctgggtggaaagatggtgttttccctgagaaactaaggctcagagaggttgaatggctctcccaaggtcacacagctggtcagctgcagagttgagaacacaggagtcctggtgctcaggccagcatctctttttttctttgagttgtttctaggtttcctagctcttgcctcagaccttaaagagagagggtctgatggggatgggcactggagacggagcatcccagcatttcacatctgagctggctttcctctgccccaggctgcagctcccactgggaggtggaggaccttggcacccacaagccgcctgtgctgaggccacgaggtcagcccaaccagtgcgtgggccacagggaggccagcatccacgcttcctgctgccatgccccaggtctggaatgcaaagtcaaggagcatggaatcccggcccctcaggagcaggtgaagaggcccgtgaggccgggtgggtggggtgctgcgtgtctctcctgcacagcttttctgtgtcagtttgtgccaccaccataccgccatgcatcagggtggcggtttgccaggtagatgctgtgggcagcttccgccattgtgtggacagcatgtatatgtgtctctgtgtggctgggtctgtttttgcttttgtccagatcagtaaggtttgctacctgggtaccccactccacttggagtagaatgtgcataaatatggcataaagaaatgcaatatgcatgcatttattgattgatctatttttttctgagatggggtcttgctgtgttgcccaggctggtctcaaattcctgggctcaagcaatcctctggtctcagcctccccaagtgttgggattataggcatgagccgctgcacctggcctctctgatctatttaacaaacctgctgggagggtctcagggtcaggagcagcactgggctctgaggacacagagctcactcagccgtgacccagagggggtgcctgagctgcatgctgaaggttgttagcatgaccagcaaggcaagaaaaggccctgccgagattagcaaggcatgtgccaagccctggaatgtgacagccgggccttctagaaacctgagtgtataactctccttaaaagccagtaggagctcctcaaaaggcagccctaaggagtccactcttaaatgaactcagagtcagttttaaaatgcaagtctgtgttgattctggtctggatggtgcattcctcgagagcaaaagacagtcttggtcttggatccacttgccctgggtacactgagggctgctaggttccaggtgctcttcctggcactggggagggatacaggcccaagagacatgctgttctccctcctggagcatctattttagtggaggaagacagaaaacaaaccattaatatagagtactgaaaagatgcgatggagaaaactatagcaaggaagggaatggggtgggagagaggtcaggagaggtctcgctgacaaggtggacgaaacaggccatgaggcagagaacatgttccaggcaaagcaaaggcccccaggtggggatgtgcagggagtaccaggaaaccagagaggtgggaatagttatgagatggggggtgcctcagaggggacagggccaagtcaggtgagacctgagggtcacagtcagcagtgagctggggccatgcaggggtctggcctcagaggagtgtggtctggcctggatctgaacctctcactgtggcctagctgctgagctgagaagagatgacaaggaccttgggcagaagcagggagactggagggaggcggtggagggtccaggcgttggggcggggctcaggctggagtctgaagggagcctgcaggcctggtgggtggatgtgggtgggagagggggaggatggcaccaaggctcgggcccctggacagatggagttgccattaagtgggatggggcaggctatggggccatcagtttcagagggatgagtttggcactggcatggtaggcatctgtctatctccacggccctcaaaccaggcatgaagcaggagctcacgtgtttggtcagccatggtgcagaaccgcctgggtgggaggtgcggggtgggagatacacggttgtgtcccaaatgggctctgagccagcgagggccgtctgcactttggcctcacagaaggatgtcggagggagaaatgaagtgtgggtgggggtcccgggccacgctagacatgtgctttcttttcctcgggctctggcaggtgaccgtggcctgcgaggagggctggaccctgactggctgcagtgccctccctgggacctcccacgtcctgggggcctacgccgtagacaacacgtgtgtagtcaggagccgggacgtcagcactacaggcagcaccagcgaaggggccgtgacagccgttgccatctgctgccggagccggcacctggcgcaggcctcccaggagctccagtgacagccccatcccaggatgggtgtctggggagggtcaagggctggggctgagctttaaaatggttccgacttgtccctctctcagccctccatggcctggcacgaggggatggggatgcttccgcctttccggggctgctggcctggcccttgagtggggcagcctccttgcctggaactcactcactctgggtgcctcctccccaggtggaggtgccaggaagctccctccctcactgtggggcatttcaccattcaaacaggtcgagctgtgctcgggtgctgccagctgctcccaatgtgccgatgtccgtgggcagaatgacttttattgagctcttgttccgtgccaggcattcaatcctcaggtctccaccaaggaggcaggattcttcccatggataggggagggggcggtaggggctgcagggacaaacatcgttggggggtgagtgtgaaaggtgctgatggccctcatctccagctaactgtggagaagcccctgggggctccctgattaatggaggcttagctttctggatggcatctagccagaggctggagacaggtgcgcccctggtggtcacaggctgtgccttggtttcctgagccacctttactctgctctatgccaggctgtgctagcaacacccaaaggtggcctgcggggagccatcacctaggactgactcggcagtgtgcagtggtgcatgcactgtctcagccaacccgctccactacccggcagggtacacattcgcacccctacttcacagaggaagaaacctggaaccagagggggcgtgcctgccaagctcacacagcaggaactgagccagaaacgcagattgggctggctctgaagccaagcctcttcttacttcacccggctgggctcctcatttttacgggtaacagtgaggctgggaaggggaacacagaccaggaagctcggtgagtgatggcagaacgatgcctgcaggcatggaactttttccgttatcacccaggcctgattcactggcctggcggagatgcttctaaggcatggtcgggggagagggccaacaactgtccctccttgagcaccagccccacccaagcaagcagacatttatcttttgggtctgtcctctctgttgcctttttacagccaacttttctagacctgttttgcttttgtaacttgaagatatttattctgggttttgtagcatttttattaatatggtgactttttaaaataaaaacaaacaaacgttgtcctaactcttgcatagacttgactgcctagggtgatgccttgcttatactaggaactgggtaagtttgttgaatagttgagtaagccaagtatttgatgagtacttttatcttgagtacaagtattgggcaagtactggtgatgtgaacttactccttgtgcctatcctaggaatgaaatgaatgtcttcctgcagctcccctgaccaccctgacagtcaaagtgcctcctccttggtgacaggtgccctacagcactctagatgctctgttgtcctgacctcccaatgcccttttcattcttttctccccagtacctggcacacagcctggcccgagtatttacggaataagttacagtgccagatgcttctgtaatgagccagtgctaagtccatggcttttttcatgatttaaaattcagaacagtctcagattgggtgcaatggctcacacctgtaatctcagtactttgggaggctgaggcaggaggattgcttgtgtttaggaattcaagaccctgggcaacagtgagaccccgtctctataaaaaaatttaaaagattagcgaggtgtggtagcacatgcctgtggtcccggctactcaggaggctgatatgggaggcttgcttgagctgggaggctgagggtgcagtgagctgtaattacatcatcactgcactgcagcctgggttacagagtgcataatgatcccattcaatgtgggacctccaggccctccactctaaggctggtgaatatagctgtcttaagcaagttctctctctctctagacagcccatgtcataaggaatctcaggcaaaattcctcccagattacattttctgacaattcagtgtcatatatggaaagcattcaagagttgacagatggcaatggcttgaacacccaactgtgttatctctgcccgttggaacctaggcctgtggtgcaaccctagactctctctccttcccctccacagaatcaagtatcagctggttagagatccacaccctgacagctctgtgatgttggaacaacttggttcttgcagagggttagcaggtggtcaccagggatcggggaggaaggggtgtggcttgcaggaaggcgaaaatctggactagcaaatagggaaggggacccatgtgagcaacgctggccactaggaatgagactgagacctgtgggatctagcaagaagcccagtgtgaccagcgacacgatctatgctggggaccacttgggagagccaaaagctttggtggagatgaatggagaccatcaacctaagttcagcatcctcctctaagctttgcagatgaatcctgaaatggtcagcccctccagagaaaagaacagcaacaggctcagaggacccacagtcccctttattagtgtaaagtactaagaggaatcaacagcatttagcaccaggcacaggctcgtgttcccccgcccactacggctgtgttctgatatatgaagaatggcggcaagactccaactctgtttttgaaaaatttattttatactcttagaagctaagaactttgccacacatgaaccaaatttagaattaaggttcttccctagtgtatctacttccttttgaaattttataaacaagattttatacacaagaggtagcagaggaaaattccagtctgcttgttccaagctcagaaggtaactgcacacacctcgatgttagcagggaaggtggggcaggacagggtaagtctgatgatacggcactctagttcctaaaactgactgtagttgtcagtgaccgtgtgaggactccaggagaagtcgtggtgagatgcccgctgggatgcttgttttctttcccaggatgccttcaacgggcagaatcggccatcttaagatcggcctcactaagggagcttcttgagaacacacagcattattgagttaattgtgcaattcctgctctgtttgcagaccattttgaaaggtttataaaaacatcttcatccaaaaaattggcagtaaaaatgacaactcttccaaggtaagcctgtcataactgtcactgttgtactacattaaaaaaagtcatcagcaggttcattgactgtagctgtcagcaatcaagtggttaccagcaaagtgaaaacgatggtcattgcagcaacaatataagcaacatgatctgaagcgtataatatacacggtggacgatcctgatgaagctttacagtgaggacggcaggtgctaggggtgcggaaggcgttgtttccataggaaataaggggactagaagtggcaatttcactcctgattttgggctcctgagagtgcagtcgccagcgatgatatcccagtgtggatcatcgccagcatttcaaggtcatgtcccacacaatctcttggtgaggatgtgggcggagagaaggtgagaatagggtaggggaaacagtaggacaggaagtattcacgtactcaaaaccaatggtagaacatcacatttcaaactgcaagaccattggaaccgtctgaagtttgccactcgcctctgtccgtttctctaagggtacagttctgctcttaagtgctggcccttccatcttctcagtgtgtttgacaaaggccactgccaacctccagcaagtcacagaataacaatgaagtctgacagcacagaaaccctcactgccagagaatgaaaagactgggccatggcgagagcacagtaatgagatgccatctgcctggccacatgcccacacaatgccacagcagccagacaggcacttcagggctggctgcgcctctgtgacttggcaaatctgacagtgaaaacctggcacttcctaaggctccctagttctgtgcatggtgagatgaaaataaggcaggacctgtaactaaaggcaaaacagggccgaaaatgtgagcaattcaaaatacaaaatgtacaaaatatatatgaaatatgtgggtgtaaacctctcccccacaccataaaagggagctggtataaatgagtgaatggtgctatactttggaaatacgactaaatggatggttattcaattgctttatatttatttctgggaaaataaatcttaaaccttgactgacttttcagtgttaattagtcatgttgaggagaaacaaat

SEQ ID NO: 3 - DNA, 20 bp, synthetic construct
  misc_feature 1..20: note = Synthetic oligonucleotide
  source 1..20: mol_type = other DNA
gtcacacttgctggcctgtc

SEQ ID NO: 4 - DNA, 16 bp, synthetic construct
  misc_feature 1..16: note = Synthetic oligonucleotide
  source 1..16: mol_type = other DNA
tctgccgtccttccca

SEQ ID NO: 5 - DNA, 16 bp, synthetic construct
  misc_feature 1..16: note = Synthetic oligonucleotide
  source 1..16: mol_type = other DNA
agcatctgccgtcctt

SEQ ID NO: 6 - DNA, 16 bp, synthetic construct
  misc_feature 1..16: note = Synthetic oligonucleotide
  source 1..16: mol_type = other DNA
tgtcaagcaccacagc

SEQ ID NO: 7 - DNA, 16 bp, synthetic construct
  misc_feature 1..16: note = Synthetic oligonucleotide
  source 1..16: mol_type = other DNA
tgacttgtcaagcacc

SEQ ID NO: 8 - DNA, 16 bp, synthetic construct
  misc_feature 1..16: note = Synthetic oligonucleotide
  source 1..16: mol_type = other DNA
ataagtgacttgtcaa

SEQ ID NO: 9 - DNA, 16 bp, synthetic construct
  misc_feature 1..16: note = Synthetic oligonucleotide
  source 1..16: mol_type = other DNA
gcattgtaagttcact

SEQ ID NO: 10 - DNA, 16 bp, synthetic construct
  misc_feature 1..16: note = Synthetic oligonucleotide
  source 1..16: mol_type = other DNA
gcttgcattgtaagtt

SEQ ID NO: 11 - DNA, 16 bp, synthetic construct
  misc_feature 1..16: note = Synthetic oligonucleotide
  source 1..16: mol_type = other DNA
ggttttcccagctctg

SEQ ID NO: 12 - DNA, 16 bp, synthetic construct
  misc_feature 1..16: note = Synthetic oligonucleotide
  source 1..16: mol_type = other DNA
ctctggttttcccagc

SEQ ID NO: 13 - DNA, 16 bp, synthetic construct
  misc_feature 1..16: note = Synthetic oligonucleotide
  source 1..16: mol_type = other DNA
ccacctctggttttcc

SEQ ID NO: 14 - DNA, 16 bp, synthetic construct
  misc_feature 1..16: note = Synthetic oligonucleotide
  source 1..16: mol_type = other DNA
gtctgctccaactgct

SEQ ID NO: 15 - DNA, 16 bp, synthetic construct
  misc_feature 1..16: note = Synthetic oligonucleotide
  source 1..16: mol_type = other DNA
ctcttgtctgctccaa

SEQ ID NO: 16 - DNA, 16 bp, synthetic construct
  misc_feature 1..16: note = Synthetic oligonucleotide
  source 1..16: mol_type = other DNA
tttagctcttgtctgc

SEQ ID NO: 17 - DNA, 16 bp, synthetic construct
  misc_feature 1..16: note = Synthetic oligonucleotide
  source 1..16: mol_type = other DNA
gcaagtccctgctaga

SEQ ID NO: 18 - DNA, 16 bp, synthetic construct
  misc_feature 1..16: note = Synthetic oligonucleotide
  source 1..16: mol_type = other DNA
cacctgcaagtccctg

SEQ ID NO: 19 - DNA, 16 bp, synthetic construct
  misc_feature 1..16: note = Synthetic oligonucleotide
  source 1..16: mol_type = other DNA
attgccacctgcaagt

SEQ ID NO: 20 - DNA, 16 bp, synthetic construct
  misc_feature 1..16: note = Synthetic oligonucleotide
  source 1..16: mol_type = other DNA
tcattctctcctcagg

SEQ ID NO: 21 - DNA, 16 bp, synthetic construct
  misc_feature 1..16: note = Synthetic oligonucleotide
  source 1..16: mol_type = other DNA
tggacccaccacattg

SEQ ID NO: 22 - DNA, 16 bp, synthetic construct
  misc_feature 1..16: note = Synthetic oligonucleotide
  source 1..16: mol_type = other DNA
tgcatggacccaccac

SEQ ID NO: 23 - DNA, 16 bp, synthetic construct
  misc_feature 1..16: note = Synthetic oligonucleotide
  source 1..16: mol_type = other DNA
catgttgcatggaccc

SEQ ID NO: 24 - DNA, 16 bp, synthetic construct
  misc_feature 1..16: note = Synthetic oligonucleotide
  source 1..16: mol_type = other DNA
acagtagccccccaac

SEQ ID NO: 25 - DNA, 16 bp, synthetic construct
  misc_feature 1..16: note = Synthetic oligonucleotide
  source 1..16: mol_type = other DNA
tcacacagtagccccc

SEQ ID NO: 26 - DNA, 16 bp, synthetic construct
  misc_feature 1..16: note = Synthetic oligonucleotide
  source 1..16: mol_type = other DNA
aaagtcacacagtagc

SEQ ID NO: 27 - DNA, 16 bp, synthetic construct
  misc_feature 1..16: note = Synthetic oligonucleotide
  source 1..16: mol_type = other DNA
ggtcacacagtttggg

SEQ ID NO: 28 - DNA, 16 bp, synthetic construct
  misc_feature 1..16: note = Synthetic oligonucleotide
  source 1..16: mol_type = other DNA
acatatgcaaggtcac

SEQ ID NO: 29 - DNA, 16 bp, synthetic construct
  misc_feature 1..16: note = Synthetic oligonucleotide
  source 1..16: mol_type = other DNA
actcagacatatgcaa

SEQ ID NO: 30 - DNA, 16 bp, synthetic construct
  misc_feature 1..16: note = Synthetic oligonucleotide
  source 1..16: mol_type = other DNA
agtgtccctcttggtc

SEQ ID NO: 31 - DNA, 16 bp, synthetic construct
  misc_feature 1..16: note = Synthetic oligonucleotide
  source 1..16: mol_type = other DNA
tgccagtgtccctctt

SEQ ID NO: 32 - DNA, 16 bp, synthetic construct
  misc_feature 1..16: note = Synthetic oligonucleotide
  source 1..16: mol_type = other DNA
tgatcctctgccagtg

SEQ ID NO: 33 - DNA, 16 bp, synthetic construct
  misc_feature 1..16: note = Synthetic oligonucleotide
  source 1..16: mol_type = other DNA
tctgtgatcctctgcc

SEQ ID NO: 34 - DNA, 16 bp, synthetic construct
  misc_feature 1..16: note = Synthetic oligonucleotide
  source 1..16: mol_type = other DNA
ggtctctgtgatcctc

SEQ ID NO: 35 - DNA, 16 bp, synthetic construct
  misc_feature 1..16: note = Synthetic oligonucleotide
  source 1..16: mol_type = other DNA
agctctagggcccatg

SEQ ID NO: 36 - DNA, 16 bp, synthetic construct
  misc_feature 1..16: note = Synthetic oligonucleotide
  source 1..16: mol_type = other DNA
agccagctctagggcc

SEQ ID NO: 37 - DNA, 16 bp, synthetic construct
  misc_feature 1..16: note = Synthetic oligonucleotide
  source 1..16: mol_type = other DNA
gtgggtgctcaaaacg

SEQ ID NO: 38 - DNA, 16 bp, synthetic construct
  misc_feature 1..16: note = Synthetic oligonucleotide
  source 1..16: mol_type = other DNA
aataatgcccccgtag

SEQ ID NO: 39 - DNA, 16 bp, synthetic construct
  misc_feature 1..16: note = Synthetic oligonucleotide
  source 1..16: mol_type = other DNA
ctggttaataatgccc

SEQ ID NO: 40 - DNA, 16 bp, synthetic construct
  misc_feature 1..16: note = Synthetic oligonucleotide
  source 1..16: mol_type = other DNA
ctggatacattggcag

SEQ ID NO: 41 - DNA, 16 bp, synthetic construct
  misc_feature 1..16: note = Synthetic oligonucleotide
  source 1..16: mol_type = other DNA
ctctgagtgtgttagg

SEQ ID NO: 42 - DNA, 16 bp, synthetic construct
  misc_feature 1..16: note = Synthetic oligonucleotide
  source 1..16: mol_type = other DNA
tgctctctgagtgtgt

SEQ ID NO: 43 - DNA, 16 bp, synthetic construct
  misc_feature 1..16: note = Synthetic oligonucleotide
  source 1..16: mol_type = other DNA
gcatgctgagcaggtc

SEQ ID NO: 44 - DNA, 16 bp, synthetic construct
  misc_feature 1..16: note = Synthetic oligonucleotide
  source 1..16: mol_type = other DNA
tgtagcatgctgagca

SEQ ID NO: 45 - DNA, 16 bp, synthetic construct
  misc_feature 1..16: note = Synthetic oligonucleotide
  source 1..16: mol_type = other DNA
attcagtggctgctct

SEQ ID NO: 46 - DNA, 16 bp, synthetic construct
  misc_feature 1..16: note = Synthetic oligonucleotide
  source 1..16: mol_type = other DNA
gagcaattcagtggct

SEQ ID NO: 47 - DNA, 16 bp, synthetic construct
  misc_feature 1..16: note = Synthetic oligonucleotide
  source 1..16: mol_type = other DNA
tcctcgggcacattct

SEQ ID NO: 48 - DNA, 16 bp, synthetic construct
  misc_feature 1..16: note = Synthetic oligonucleotide
  source 1..16: mol_type = other DNA
ttggccacgccggcat

SEQ ID NO: 49 - DNA, 16 bp, synthetic construct
  misc_feature 1..16: note = Synthetic oligonucleotide
  source 1..16: mol_type = other DNA
atttagcagctacggc

SEQ ID NO: 50 - DNA, 16 bp, synthetic construct
  misc_feature 1..16: note = Synthetic oligonucleotide
  source 1..16: mol_type = other DNA
caactatttagcagct

SEQ ID NO: 51 - DNA, 16 bp, synthetic construct
  misc_feature 1..16: note = Synthetic oligonucleotide
  source 1..16: mol_type = other DNA
aggttaccgctgtcag

SEQ ID NO: 52 - DNA, 16 bp, synthetic construct
  misc_feature 1..16: note = Synthetic oligonucleotide
  source 1..16: mol_type = other DNA
gacctaggttaccgct

SEQ ID NO: 53 - DNA, 16 bp, synthetic construct
  misc_feature 1..16: note = Synthetic oligonucleotide
  source 1..16: mol_type = other DNA
ccactctgtgacacaa

SEQ ID NO: 54 - DNA, 16 bp, synthetic construct
  misc_feature 1..16: note = Synthetic oligonucleotide
  source 1..16: mol_type = other DNA
atgtcccactctgtga

SEQ ID NO: 55 - DNA, 16 bp, synthetic construct
  misc_feature 1..16: note = Synthetic oligonucleotide
  source 1..16: mol_type = other DNA
ctcgaaggtaagccgc

SEQ ID NO: 56 - DNA, 16 bp, synthetic construct
  misc_feature 1..16: note = Synthetic oligonucleotide
  source 1..16: mol_type = other DNA
cagcactgtcctgcag

SEQ ID NO: 57 - DNA, 16 bp, synthetic construct
  misc_feature 1..16: note = Synthetic oligonucleotide
  source 1..16: mol_type = other DNA
tttttgctggtttgag

SEQ ID NO: 58 - DNA, 16 bp, synthetic construct
  misc_feature 1..16: note = Synthetic oligonucleotide
  source 1..16: mol_type = other DNA
cacttttttgctggtt

SEQ ID NO: 59 - DNA, 16 bp, synthetic construct
  misc_feature 1..16: note = Synthetic oligonucleotide
  source 1..16: mol_type = other DNA
aattccacttttttgc

SEQ ID NO: 60 - DNA, 16 bp, synthetic construct
  misc_feature 1..16: note = Synthetic oligonucleotide
  source 1..16: mol_type = other DNA
atctgtgcactatcct

SEQ ID NO: 61 - DNA, 16 bp, synthetic construct
  misc_feature 1..16: note = Synthetic oligonucleotide
  source 1..16: mol_type = other DNA
tggcatctgtgcacta

SEQ ID NO: 62 - DNA, 16 bp, synthetic construct
  misc_feature 1..16: note = Synthetic oligonucleotide
  source 1..16: mol_type = other DNA
tctcacacgagcatta

SEQ ID NO: 63 - DNA, 16 bp, synthetic construct
  misc_feature 1..16: note = Synthetic oligonucleotide
  source 1..16: mol_type = other DNA
ctgcctctcacacgag

SEQ ID NO: 64 - DNA, 16 bp, synthetic construct
  misc_feature 1..16: note = Synthetic oligonucleotide
  source 1..16: mol_type = other DNA
tcttatggaggaggaa

SEQ ID NO: 65 - DNA, 16 bp, synthetic construct
  misc_feature 1..16: note = Synthetic oligonucleotide
  source 1..16: mol_type = other DNA
tgttttcgacacaggg

SEQ ID NO: 66 - DNA, 16 bp, synthetic construct
  misc_feature 1..16: note = Synthetic oligonucleotide
  source 1..16: mol_type = other DNA
ggcatgttttcgacac

SEQ ID NO: 67 - DNA, 16 bp, synthetic construct
  misc_feature 1..16: note = Synthetic oligonucleotide
  source 1..16: mol_type = other DNA
catcttttcagtactc

SEQ ID NO: 68 - DNA, 16 bp, synthetic construct
  misc_feature 1..16: note = Synthetic oligonucleotide
  source 1..16: mol_type = other DNA
atcgcatcttttcagt

SEQ ID NO: 69 - DNA, 16 bp, synthetic construct
  misc_feature 1..16: note = Synthetic oligonucleotide
  source 1..16: mol_type = other DNA
ctgtcactggagctcc

SEQ ID NO: 70 - DNA, 16 bp, synthetic construct
  misc_feature 1..16: note = Synthetic oligonucleotide
  source 1..16: mol_type = other DNA
gtcggaaccattttaa

SEQ ID NO: 71 - DNA, 16 bp, synthetic construct
  misc_feature 1..16: note = Synthetic oligonucleotide
  source 1..16: mol_type = other DNA
ggacaagtcggaacca

SEQ ID NO: 72 - DNA, 16 bp, synthetic construct
  misc_feature 1..16: note = Synthetic oligonucleotide
  source 1..16: mol_type = other DNA
agagggacaagtcgga

SEQ ID NO: 73 - DNA, 16 bp, synthetic construct
  misc_feature 1..16: note = Synthetic oligonucleotide
  source 1..16: mol_type = other DNA
atctccgccaggccag

SEQ ID NO: 74 - DNA, 16 bp, synthetic construct
  misc_feature 1..16: note = Synthetic oligonucleotide
  source 1..16: mol_type = other DNA
aagcatctccgccagg

SEQ ID NO: 75 - DNA, 16 bp, synthetic construct
  misc_feature 1..16: note = Synthetic oligonucleotide
  source 1..16: mol_type = other DNA
cttagaagcatctccg

SEQ ID NO: 76 - DNA, 16 bp, synthetic construct
  misc_feature 1..16: note = Synthetic oligonucleotide
  source 1..16: mol_type = other DNA
ccatgccttagaagca

SEQ ID NO: 77 - DNA, 16 bp, synthetic construct
  misc_feature 1..16: note = Synthetic oligonucleotide
  source 1..16: mol_type = other DNA
tgtctgcttgcttggg

SEQ ID NO: 78 - DNA, 16 bp, synthetic construct
  misc_feature 1..16: note = Synthetic oligonucleotide
  source 1..16: mol_type = other DNA
gataaatgtctgcttg

SEQ ID NO: 79 - DNA, 16 bp, synthetic construct
  misc_feature 1..16: note = Synthetic oligonucleotide
  source 1..16: mol_type = other DNA
gtctagaaaagttggc

SEQ ID NO: 80 - DNA, 16 bp, synthetic construct
  misc_feature 1..16: note = Synthetic oligonucleotide
  source 1..16: mol_type = other DNA
acaggtctagaaaagt

SEQ ID NO: 81 - DNA, 16 bp, synthetic construct
  misc_feature 1..16: note = Synthetic oligonucleotide
  source 1..16: mol_type = other DNA
aaaagcaaaacaggtc

SEQ ID NO: 82 - DNA, 16 bp, synthetic construct
  misc_feature 1..16: note = Synthetic oligonucleotide
  source 1..16: mol_type = other DNA
atctgccgtccttccc

SEQ ID NO: 83 - DNA, 16 bp, synthetic construct
  misc_feature 1..16: note = Synthetic oligonucleotide
  source 1..16: mol_type = other DNA
cagcatctgccgtcct

SEQ ID NO: 84 - DNA, 16 bp, synthetic construct
  misc_feature 1..16: note = Synthetic oligonucleotide
  source 1..16: mol_type = other DNA
cttgtcaagcaccaca

SEQ ID NO: 85 - DNA, 16 bp, synthetic construct
  misc_feature 1..16: note = Synthetic oligonucleotide
  source 1..16: mol_type = other DNA
gtgacttgtcaagcac

SEQ ID NO: 86 - DNA, 16 bp, synthetic construct
  misc_feature 1..16: note = Synthetic oligonucleotide
  source 1..16: mol_type = other DNA
tgtaagttcactcatg

SEQ ID NO: 87 - DNA, 16 bp, synthetic construct
  misc_feature 1..16: note = Synthetic oligonucleotide
  source 1..16: mol_type = other DNA
tgcattgtaagttcac

SEQ ID NO: 88 - DNA, 16 bp, synthetic construct
  misc_feature 1..16: note = Synthetic oligonucleotide
  source 1..16: mol_type = other DNA
gggcttgcattgtaag

SEQ ID NO: 89 - DNA, 16 bp, synthetic construct
  misc_feature 1..16: note = Synthetic oligonucleotide
  source 1..16: mol_type = other DNA
tggttttcccagctct

SEQ ID NO: 90 - DNA, 16 bp, synthetic construct
  misc_feature 1..16: note = Synthetic oligonucleotide
  source 1..16: mol_type = other DNA
cctctggttttcccag

SEQ ID NO: 91 - DNA, 16 bp, synthetic construct
  misc_feature 1..16: note = Synthetic oligonucleotide
  source 1..16: mol_type = other DNA
tccacctctggttttc

SEQ ID NO: 92 - DNA, 16 bp, synthetic construct
  misc_feature 1..16: note = Synthetic oligonucleotide
  source 1..16: mol_type = other DNA
ttgtctgctccaactg

SEQ ID NO: 93 - DNA, 16 bp, synthetic construct
  misc_feature 1..16: note = Synthetic oligonucleotide
  source 1..16: mol_type = other DNA
gctcttgtctgctcca

SEQ ID NO: 94 - DNA, 16 bp, synthetic construct
  misc_feature 1..16: note = Synthetic oligonucleotide
  source 1..16: mol_type = other DNA
tataaatctcccatcc

SEQ ID NO: 95 - DNA, 16 bp, synthetic construct
  misc_feature 1..16: note = Synthetic oligonucleotide
  source 1..16: mol_type = other DNA
ctgcaagtccctgcta

SEQ ID NO: 96 - DNA, 16 bp, synthetic construct
  misc_feature 1..16: note = Synthetic oligonucleotide
  source 1..16: mol_type = other DNA
ccacctgcaagtccct

SEQ ID NO: 97 - DNA, 16 bp, synthetic construct
  misc_feature 1..16: note = Synthetic oligonucleotide
  source 1..16: mol_type = other DNA
ctctcctcaggccagg

SEQ ID NO: 98 - DNA, 16 bp, synthetic construct
  misc_feature 1..16: note = Synthetic oligonucleotide
  source 1..16: mol_type = other DNA
cccaccacattgcatc

SEQ ID NO: 99 - DNA, 16 bp, synthetic construct
  misc_feature 1..16: note = Synthetic oligonucleotide
  source 1..16: mol_type = other DNA
atggacccaccacatt

SEQ ID NO: 100 - DNA, 16 bp, synthetic construct
  misc_feature 1..16: note = Synthetic oligonucleotide
  source 1..16: mol_type = other DNA
ttgcatggacccacca

SEQ ID NO: 101 - DNA, 16 bp, synthetic construct
  misc_feature 1..16: note = Synthetic oligonucleotide
  source 1..16: mol_type = other DNA
cgagaaccggtaaggg

SEQ ID NO: 102 - DNA, 16 bp, synthetic construct
  misc_feature 1..16: note = Synthetic oligonucleotide
  source 1..16: mol_type = other DNA
cacagtagccccccaa

SEQ ID NO: 103 - DNA, 16 bp, synthetic construct
  misc_feature 1..16: note = Synthetic oligonucleotide
  source 1..16: mol_type = other DNA
gtcacacagtagcccc

SEQ ID NO: 104 - DNA, 16 bp, synthetic construct
  misc_feature 1..16: note = Synthetic oligonucleotide
  source 1..16: mol_type = other DNA
gcaaagtcacacagta

SEQ ID NO: 105 - DNA, 16 bp, synthetic construct
  misc_feature 1..16: note = Synthetic oligonucleotide
  source 1..16: mol_type = other DNA
aggtcacacagtttgg

SEQ ID NO: 106 - DNA, 16 bp, synthetic construct
  misc_feature 1..16: note = Synthetic oligonucleotide
  source 1..16: mol_type = other DNA
gacatatgcaaggtca

SEQ ID NO: 107 - DNA, 16 bp, synthetic construct
  misc_feature 1..16: note = Synthetic oligonucleotide
  source 1..16: mol_type = other DNA
tccctcttggtctctg

SEQ ID NO: 108 - DNA, 16 bp, synthetic construct
  misc_feature 1..16: note = Synthetic oligonucleotide
  source 1..16: mol_type = other DNA
cagtgtccctcttggt

SEQ ID NO: 109 - DNA, 16 bp, synthetic construct
  misc_feature 1..16: note = Synthetic oligonucleotide
  source 1..16: mol_type = other DNA
ctgccagtgtccctct

SEQ ID NO: 110 - DNA, 16 bp, synthetic construct
  misc_feature 1..16: note = Synthetic oligonucleotide
  source 1..16: mol_type = other DNA
gtgatcctctgccagt

SEQ ID NO: 111 - DNA, 16 bp, synthetic construct
  misc_feature 1..16: note = Synthetic oligonucleotide
  source 1..16: mol_type = other DNA
ctctgtgatcctctgc

SEQ ID NO: 112 - DNA, 16 bp, synthetic construct
  misc_feature 1..16: note = Synthetic oligonucleotide
  source 1..16: mol_type = other DNA
gggtctctgtgatcct

SEQ ID NO: 113 - DNA, 16 bp, synthetic construct
  misc_feature 1..16: note = Synthetic oligonucleotide
  source 1..16: mol_type = other DNA
cagctctagggcccat

SEQ ID NO: 114 - DNA, 16 bp, synthetic construct
  misc_feature 1..16: note = Synthetic oligonucleotide
  source 1..16: mol_type = other DNA
cagccagctctagggc

SEQ ID NO: 115 - DNA, 16 bp, synthetic construct
  misc_feature 1..16: note = Synthetic oligonucleotide
  source 1..16: mol_type = other DNA
agtgggtgctcaaaac

SEQ ID NO: 116 - DNA, 16 bp, synthetic construct
  misc_feature 1..16: note = Synthetic oligonucleotide
  source 1..16: mol_type = other DNA
ttaataatgcccccgt

SEQ ID NO: 117 - DNA, 16 bp, synthetic construct
  misc_feature 1..16: note = Synthetic oligonucleotide
  source 1..16: mol_type = other DNA
cctggttaataatgcc

SEQ ID NO: 118 - DNA, 16 bp, synthetic construct
  misc_feature 1..16: note = Synthetic oligonucleotide
  source 1..16: mol_type = other DNA
gagtgtgttaggagct

SEQ ID NO: 119 - DNA, 16 bp, synthetic construct
  misc_feature 1..16: note = Synthetic oligonucleotide
  source 1..16: mol_type = other DNA
tctctgagtgtgttag

SEQ ID NO: 120 - DNA, 16 bp, synthetic construct
  misc_feature 1..16: note = Synthetic oligonucleotide
  source 1..16: mol_type = other DNA
cttgctctctgagtgt

SEQ ID NO: 121 - DNA, 16 bp, synthetic construct
  misc_feature 1..16: note = Synthetic oligonucleotide
  source 1..16: mol_type = other DNA
agcatgctgagcaggt

SEQ ID NO: 122 - DNA, 16 bp, synthetic construct
  misc_feature 1..16: note = Synthetic oligonucleotide
  source 1..16: mol_type = other DNA
ctgtagcatgctgagc

SEQ ID NO: 123 - DNA, 16 bp, synthetic construct
  misc_feature 1..16: note = Synthetic oligonucleotide
  source 1..16: mol_type = other DNA
aattcagtggctgctc

SEQ ID NO: 124 - DNA, 16 bp, synthetic construct
  misc_feature 1..16: note = Synthetic oligonucleotide
  source 1..16: mol_type = other DNA
agagcaattcagtggc

SEQ ID NO: 125 - DNA, 16 bp, synthetic construct
  misc_feature 1..16: note = Synthetic oligonucleotide
  source 1..16: mol_type = other DNA
cctcctcgggcacatt

SEQ ID NO: 126 - DNA, 16 bp, synthetic construct
  misc_feature 1..16: note = Synthetic oligonucleotide
  source 1..16: mol_type = other DNA
ctatttagcagctacg

SEQ ID NO: 127 - DNA, 16 bp, synthetic construct
  misc_feature 1..16: note = Synthetic oligonucleotide
  source 1..16: mol_type = other DNA
tcaactatttagcagc

SEQ ID NO: 128 - DNA, 16 bp, synthetic construct
  misc_feature 1..16: note = Synthetic oligonucleotide
  source 1..16: mol_type = other DNA
taggttaccgctgtca

SEQ ID NO: 129 - DNA, 16 bp, synthetic construct
  misc_feature 1..16: note = Synthetic oligonucleotide
  source 1..16: mol_type = other DNA
ggacctaggttaccgc

SEQ ID NO: 130 - DNA, 16 bp, synthetic construct
  misc_feature 1..16: note = Synthetic oligonucleotide
  source 1..16: mol_type = other DNA
cccactctgtgacaca

SEQ ID NO: 131 - DNA, 16 bp, synthetic construct
  misc_feature 1..16: note = Synthetic oligonucleotide
  source 1..16: mol_type = other DNA
tgatgtcccactctgt

SEQ ID NO: 132 - DNA, 16 bp, synthetic construct
  misc_feature 1..16: note = Synthetic oligonucleotide
  source 1..16: mol_type = other DNA
gtcctgcagcctctag

SEQ ID NO: 133 - DNA, 16 bp, synthetic construct
  misc_feature 1..16: note = Synthetic oligonucleotide
  source 1..16: mol_type = other DNA
ccagcactgtcctgca

SEQ ID NO: 134 - DNA, 16 bp, synthetic construct
  misc_feature 1..16: note = Synthetic oligonucleotide
  source 1..16: mol_type = other DNA
ttttttgctggtttga

SEQ ID NO: 135 - DNA, 16 bp, synthetic construct
  misc_feature 1..16: note = Synthetic oligonucleotide
  source 1..16: mol_type = other DNA
ccacttttttgctggt

SEQ ID NO: 136 - DNA, 16 bp, synthetic construct
  misc_feature 1..16: note = Synthetic oligonucleotide
  source 1..16: mol_type = other DNA
caattccacttttttg

SEQ ID NO: 137 - DNA, 16 bp, synthetic construct
  misc_feature 1..16: note = Synthetic oligonucleotide
  source 1..16: mol_type = other DNA
catctgtgcactatcc

SEQ ID NO: 138 - DNA, 16 bp, synthetic construct
  misc_feature 1..16: note = Synthetic oligonucleotide
  source 1..16: mol_type = other DNA
atggcatctgtgcact

SEQ ID NO: 139 - DNA, 16 bp, synthetic construct
  misc_feature 1..16: note = Synthetic oligonucleotide
  source 1..16: mol_type = other DNA
cctctcacacgagcat

SEQ ID NO: 140 - DNA, 16 bp, synthetic construct
  misc_feature 1..16: note = Synthetic oligonucleotide
  source 1..16: mol_type = other DNA
tctgcctctcacacga

SEQ ID NO: 141 - DNA, 16 bp, synthetic construct
  misc_feature 1..16: note = Synthetic oligonucleotide
  source 1..16: mol_type = other DNA
ttcgacacagggtagc

SEQ ID NO: 142 - DNA, 16 bp, synthetic construct
  misc_feature 1..16: note = Synthetic oligonucleotide
  source 1..16: mol_type = other DNA
atgttttcgacacagg

SEQ ID NO: 143 - DNA, 16 bp, synthetic construct
  misc_feature 1..16: note = Synthetic oligonucleotide
  source 1..16: mol_type = other DNA
tgggcatgttttcgac

SEQ ID NO: 144 - DNA, 16 bp, synthetic construct
  misc_feature 1..16: note = Synthetic oligonucleotide
  source 1..16: mol_type = other DNA
gcatcttttcagtact

SEQ ID NO: 145 - DNA, 16 bp, synthetic construct
  misc_feature 1..16: note = Synthetic oligonucleotide
  source 1..16: mol_type = other DNA
catcgcatcttttcag

SEQ ID NO: 146 - DNA, 16 bp, synthetic construct
  misc_feature 1..16: note = Synthetic oligonucleotide
  source 1..16: mol_type = other DNA
gctgtcactggagctc

SEQ ID NO: 147 - DNA, 16 bp, synthetic construct
  misc_feature 1..16: note = Synthetic oligonucleotide
  source 1..16: mol_type = other DNA
aagtcggaaccatttt

SEQ ID NO: 148 - DNA, 16 bp, synthetic construct
  misc_feature 1..16: note = Synthetic oligonucleotide
  source 1..16: mol_type = other DNA
gggacaagtcggaacc

SEQ ID NO: 149 - DNA, 16 bp, synthetic construct
  misc_feature 1..16: note = Synthetic oligonucleotide
  source 1..16: mol_type = other DNA
tccgccaggccagtga

SEQ ID NO: 150 - DNA, 16 bp, synthetic construct
  misc_feature 1..16: note = Synthetic oligonucleotide
  source 1..16: mol_type = other DNA
catctccgccaggcca

SEQ ID NO: 151 - DNA, 16 bp, synthetic construct
  misc_feature 1..16: note = Synthetic oligonucleotide
  source 1..16: mol_type = other DNA
gaagcatctccgccag

SEQ ID NO: 152 - DNA, 16 bp, synthetic construct
  misc_feature 1..16: note = Synthetic oligonucleotide
  source 1..16: mol_type = other DNA
gccttagaagcatctc

SEQ ID NO: 153 - DNA, 16 bp, synthetic construct
  misc_feature 1..16: note = Synthetic oligonucleotide
  source 1..16: mol_type = other DNA
accatgccttagaagc

SEQ ID NO: 154 - DNA, 16 bp, synthetic construct
  misc_feature 1..16: note = Synthetic oligonucleotide
  source 1..16: mol_type = other DNA
aatgtctgcttgcttg

SEQ ID NO: 155 - DNA, 16 bp, synthetic construct
  misc_feature 1..16: note = Synthetic oligonucleotide
  source 1..16: mol_type = other DNA
aagataaatgtctgct

SEQ ID NO: 156 - DNA, 16 bp, synthetic construct
  misc_feature 1..16: note = Synthetic oligonucleotide
  source 1..16: mol_type = other DNA
ggtctagaaaagttgg

SEQ ID NO: 157 - DNA, 16 bp, synthetic construct
  misc_feature 1..16: note = Synthetic oligonucleotide
  source 1..16: mol_type = other DNA
gcaaaacaggtctaga

SEQ ID NO: 158 - DNA, 16 bp, synthetic construct
  misc_feature 1..16: note = Synthetic oligonucleotide
  source 1..16: mol_type = other DNA
acccagaataaatatc

SEQ ID NO: 159 - DNA, 16 bp, synthetic construct
  misc_feature 1..16: note = Synthetic oligonucleotide
  source 1..16: mol_type = other DNA
catctgccgtccttcc

SEQ ID NO: 160 - DNA, 16 bp, synthetic construct
  misc_feature 1..16: note = Synthetic oligonucleotide
  source 1..16: mol_type = other DNA
ccagcatctgccgtcc

SEQ ID NO: 161 - DNA, 16 bp, synthetic construct
  misc_feature 1..16: note = Synthetic oligonucleotide
  source 1..16: mol_type = other DNA
acttgtcaagcaccac

SEQ ID NO: 162 - DNA, 16 bp, synthetic construct
  misc_feature 1..16: note = Synthetic oligonucleotide
  source 1..16: mol_type = other DNA
agtgacttgtcaagca

SEQ ID NO: 163 - DNA, 16 bp, synthetic construct
  misc_feature 1..16: note = Synthetic oligonucleotide
  source 1..16: mol_type = other DNA
attgtaagttcactca

SEQ ID NO: 164 - DNA, 16 bp, synthetic construct
  misc_feature 1..16: note = Synthetic oligonucleotide
  source 1..16: mol_type = other DNA
ttgcattgtaagttca

SEQ ID NO: 165 - DNA, 16 bp, synthetic construct
  misc_feature 1..16: note = Synthetic oligonucleotide
  source 1..16: mol_type = other DNA
aaattgaatgaattgg

SEQ ID NO: 166 - DNA, 16 bp, synthetic construct
  misc_feature 1..16: note = Synthetic oligonucleotide
  source 1..16: mol_type = other DNA
ctggttttcccagctc

SEQ ID NO: 167 - DNA, 16 bp, synthetic construct
  misc_feature 1..16: note = Synthetic oligonucleotide
  source 1..16: mol_type = other DNA
acctctggttttccca

SEQ ID NO: 168 - DNA, 16 bp, synthetic construct
  misc_feature 1..16: note = Synthetic oligonucleotide
  source 1..16: mol_type = other DNA
ttccacctctggtttt

SEQ ID NO: 169 - DNA, 16 bp, synthetic construct
  misc_feature 1..16: note = Synthetic oligonucleotide
  source 1..16: mol_type = other DNA
cttgtctgctccaact

SEQ ID NO: 170 - DNA, 16 bp, synthetic construct
  misc_feature 1..16: note = Synthetic oligonucleotide
  source 1..16: mol_type = other DNA
agctcttgtctgctcc

SEQ ID NO: 171 - DNA, 16 bp, synthetic construct
  misc_feature 1..16: note = Synthetic oligonucleotide
  source 1..16: mol_type = other DNA
attgagggaaaaaatc

SEQ ID NO: 172 - DNA, 16 bp, synthetic construct
  misc_feature 1..16: note = Synthetic oligonucleotide
  source 1..16: mol_type = other DNA
cctgcaagtccctgct

SEQ ID NO: 173 - DNA, 16 bp, synthetic construct
  misc_feature 1..16: note = Synthetic oligonucleotide
  source 1..16: mol_type = other DNA
gccacctgcaagtccc

SEQ ID NO: 174 - DNA, 16 bp, synthetic construct
  misc_feature 1..16: note = Synthetic oligonucleotide
  source 1..16: mol_type = other DNA
attctctcctcaggcc

SEQ ID NO: 175 - DNA, 16 bp, synthetic construct
  misc_feature 1..16: note = Synthetic oligonucleotide
  source 1..16: mol_type = other DNA
gacccaccacattgca

SEQ ID NO: 176 - DNA, 16 bp, synthetic construct
  misc_feature 1..16: note = Synthetic oligonucleotide
  source 1..16: mol_type = other DNA
catggacccaccacat

SEQ ID NO: 177 - DNA, 16 bp, synthetic construct
  misc_feature 1..16: note = Synthetic oligonucleotide
  source 1..16: mol_type = other DNA
gttgcatggacccacc

SEQ ID NO: 178 - DNA, 16 bp, synthetic construct
  misc_feature 1..16: note = Synthetic oligonucleotide
  source 1..16: mol_type = other DNA
agtagccccccaactt

SEQ ID NO: 179 - DNA, 16 bp, synthetic construct
  misc_feature 1..16: note = Synthetic oligonucleotide
  source 1..16: mol_type = other DNA
acacagtagcccccca

SEQ ID NO: 180 - DNA, 16 bp, synthetic construct
  misc_feature 1..16: note = Synthetic oligonucleotide
  source 1..16: mol_type = other DNA
agtcacacagtagccc

SEQ ID NO: 181 - DNA, 16 bp, synthetic construct
  misc_feature 1..16: note = Synthetic oligonucleotide
  source 1..16: mol_type = other DNA
cacacagtttgggtgt

SEQ ID NO: 182 - DNA, 16 bp, synthetic construct
  misc_feature 1..16: note = Synthetic oligonucleotide
  source 1..16: mol_type = other DNA
atatgcaaggtcacac

SEQ ID NO: 183 - DNA, 16 bp, synthetic construct
  misc_feature 1..16: note = Synthetic oligonucleotide
  source 1..16: mol_type = other DNA
agacatatgcaaggtc

SEQ ID NO: 184 - DNA, 16 bp, synthetic construct
  misc_feature 1..16: note = Synthetic oligonucleotide
  source 1..16: mol_type = other DNA
tgtccctcttggtctc

SEQ ID NO: 185 - DNA, 16 bp, synthetic construct
  misc_feature 1..16: note = Synthetic oligonucleotide
  source 1..16: mol_type = other DNA
ccagtgtccctcttgg

SEQ ID NO: 186 - DNA, 16 bp, synthetic construct
  misc_feature 1..16: note = Synthetic oligonucleotide
  source 1..16: mol_type = other DNA
tctgccagtgtccctc

SEQ ID NO: 187 - DNA, 16 bp, synthetic construct
  misc_feature 1..16: note = Synthetic oligonucleotide
  source 1..16: mol_type = other DNA
tgtgatcctctgccag

SEQ ID NO: 188 - DNA, 16 bp, synthetic construct
  misc_feature 1..16: note = Synthetic oligonucleotide
  source 1..16: mol_type = other DNA
tctctgtgatcctctg

SEQ ID NO: 189 - DNA, 16 bp, synthetic construct
  misc_feature 1..16: note = Synthetic oligonucleotide
  source 1..16: mol_type = other DNA
tctagggcccatgctt

SEQ ID NO: 190 - DNA, 16 bp, synthetic construct
  misc_feature 1..16: note = Synthetic oligonucleotide
  source 1..16: mol_type = other DNA
ccagctctagggccca

SEQ ID NO: 191 - DNA, 16 bp, synthetic construct
  misc_feature 1..16: note = Synthetic oligonucleotide
  source 1..16: mol_type = other DNA
ggcagccagctctagg

SEQ ID NO: 192 - DNA, 16 bp, synthetic construct
  misc_feature 1..16: note = Synthetic oligonucleotide
  source 1..16: mol_type = other DNA
cgcacagtgggtgctc

SEQ ID NO: 193 - DNA, 16 bp, synthetic construct
  misc_feature 1..16: note = Synthetic oligonucleotide
  source 1..16: mol_type = other DNA
ggttaataatgccccc

SEQ ID NO: 194 - DNA, 16 bp, synthetic construct
  misc_feature 1..16: note = Synthetic oligonucleotide
  source 1..16: mol_type = other DNA
gcctggttaataatgc

SEQ ID NO: 195 - DNA, 16 bp, synthetic construct
  misc_feature 1..16: note = Synthetic oligonucleotide
  source 1..16: mol_type = other DNA
ctgagtgtgttaggag

SEQ ID NO: 196 - DNA, 16 bp, synthetic construct
  misc_feature 1..16: note = Synthetic oligonucleotide
  source 1..16: mol_type = other DNA
ctctctgagtgtgtta

SEQ ID NO: 197 - DNA, 16 bp, synthetic construct
  misc_feature 1..16: note = Synthetic oligonucleotide
  source 1..16: mol_type = other DNA
tgctgagcaggtcctt

SEQ ID NO: 198 - DNA, 16 bp, synthetic construct
  misc_feature 1..16: note = Synthetic oligonucleotide
  source 1..16: mol_type = other DNA
tagcatgctgagcagg

SEQ ID NO: 199 - DNA, 16 bp, synthetic construct
  misc_feature 1..16: note = Synthetic oligonucleotide
  source 1..16: mol_type = other DNA
ttctgtagcatgctga

SEQ ID NO: 200 - DNA, 16 bp, synthetic construct
  misc_feature 1..16: note = Synthetic oligonucleotide
  source 1..16: mol_type = other DNA
caattcagtggctgct

SEQ ID NO: 201 - DNA, 16 bp, synthetic construct
  misc_feature 1..16: note = Synthetic oligonucleotide
  source 1..16: mol_type = other DNA
acagagcaattcagtg

SEQ ID NO: 202 - DNA, 16 bp, synthetic construct
  misc_feature 1..16: note = Synthetic oligonucleotide
  source 1..16: mol_type = other DNA
actatttagcagctac

SEQ ID NO: 203 - DNA, 16 bp, synthetic construct
  misc_feature 1..16: note = Synthetic oligonucleotide
  source 1..16: mol_type = other DNA
gtcaactatttagcag

SEQ ID NO: 204 - DNA, 16 bp, synthetic construct
  misc_feature 1..16: note = Synthetic oligonucleotide
  source 1..16: mol_type = other DNA
ctaggttaccgctgtc

SEQ ID NO: 205 - DNA, 16 bp, synthetic construct
  misc_feature 1..16: note = Synthetic oligonucleotide
  source 1..16: mol_type = other DNA
gggacctaggttaccg

SEQ ID NO: 206 - DNA, 16 bp, synthetic construct
  misc_feature 1..16: note = Synthetic oligonucleotide
  source 1..16: mol_type = other DNA
ctctgtgacacaaagc

SEQ ID NO: 207 - DNA, 16 bp, synthetic construct
  misc_feature 1..16: note = Synthetic oligonucleotide
  source 1..16: mol_type = other DNA
gtcccactctgtgaca

SEQ ID NO: 208 - DNA, 16 bp, synthetic construct
  misc_feature 1..16: note = Synthetic oligonucleotide
  source 1..16: mol_type = other DNA
gcactgtcctgcagcc

SEQ ID NO: 209 - DNA, 16 bp, synthetic construct
  misc_feature 1..16: note = Synthetic oligonucleotide
  source 1..16: mol_type = other DNA
atccagcactgtcctg

SEQ ID NO: 210 - DNA, 16 bp, synthetic construct
  misc_feature 1..16: note = Synthetic oligonucleotide
  source 1..16: mol_type = other DNA
cttttttgctggtttg

SEQ ID NO: 211 - DNA, 16 bp, synthetic construct
  misc_feature 1..16: note = Synthetic oligonucleotide
  source 1..16: mol_type = other DNA
tccacttttttgctgg

SEQ ID NO: 212 - DNA, 16 bp, synthetic construct
  misc_feature 1..16: note = Synthetic oligonucleotide
  source 1..16: mol_type = other DNA
tgtgcactatcctgta

SEQ ID NO: 213 - DNA, 16 bp, synthetic construct
  misc_feature 1..16: note = Synthetic oligonucleotide
  source 1..16: mol_type = other DNA
gcatctgtgcactatc

SEQ ID NO: 214 - DNA, 16 bp, synthetic construct
  misc_feature 1..16: note = Synthetic oligonucleotide
  source 1..16: mol_type = other DNA
agatggcatctgtgca

SEQ ID NO: 215 - DNA, 16 bp, synthetic construct
  misc_feature 1..16: note = Synthetic oligonucleotide
  source 1..16: mol_type = other DNA
gcctctcacacgagca

SEQ ID NO: 216 - DNA, 16 bp, synthetic construct
  misc_feature 1..16: note = Synthetic oligonucleotide
  source 1..16: mol_type = other DNA
actctgcctctcacac

SEQ ID NO: 217 - DNA, 16 bp, synthetic construct
  misc_feature 1..16: note = Synthetic oligonucleotide
  source 1..16: mol_type = other DNA
ttttcgacacagggta

SEQ ID NO: 218 - DNA, 16 bp, synthetic construct
  misc_feature 1..16: note = Synthetic oligonucleotide
  source 1..16: mol_type = other DNA
catgttttcgacacag

SEQ ID NO: 219 - DNA, 16 bp, synthetic construct
  misc_feature 1..16: note = Synthetic oligonucleotide
  source 1..16: mol_type = other DNA
cttttcagtactctat

SEQ ID NO: 220 - DNA, 16 bp, synthetic construct
  misc_feature 1..16: note = Synthetic oligonucleotide
  source 1..16: mol_type = other DNA
cgcatcttttcagtac

SEQ ID NO: 221 - DNA, 16 bp, synthetic construct
  misc_feature 1..16: note = Synthetic oligonucleotide
  source 1..16: mol_type = other DNA
tccatcgcatcttttc

SEQ ID NO: 222 - DNA, 16 bp, synthetic construct
  misc_feature 1..16: note = Synthetic oligonucleotide
  source 1..16: mol_type = other DNA
cactggagctcctggg

SEQ ID NO: 223 - DNA, 16 bp, synthetic construct
  misc_feature 1..16: note = Synthetic oligonucleotide
  source 1..16: mol_type = other DNA
ggctgtcactggagct

SEQ ID NO: 224 - DNA, 16 bp, synthetic construct
  misc_feature 1..16: note = Synthetic oligonucleotide
  source 1..16: mol_type = other DNA
caagtcggaaccattt

SEQ ID NO: 225 - DNA, 16 bp, synthetic construct
  misc_feature 1..16: note = Synthetic oligonucleotide
  source 1..16: mol_type = other DNA
agggacaagtcggaac

SEQ ID NO: 226 - DNA, 16 bp, synthetic construct
  misc_feature 1..16: note = Synthetic oligonucleotide
  source 1..16: mol_type = other DNA
ctccgccaggccagtg

SEQ ID NO: 227 - DNA, 16 bp, synthetic construct
  misc_feature 1..16: note = Synthetic oligonucleotide
  source 1..16: mol_type = other DNA
gcatctccgccaggcc

SEQ ID NO: 228 - DNA, 16 bp, synthetic construct
  misc_feature 1..16: note = Synthetic oligonucleotide
  source 1..16: mol_type = other DNA
agaagcatctccgcca

SEQ ID NO: 229 - DNA, 16 bp, synthetic construct
  misc_feature 1..16: note = Synthetic oligonucleotide
  source 1..16: mol_type = other DNA
atgccttagaagcatc

SEQ ID NO: 230 - DNA, 16 bp, synthetic construct
  misc_feature 1..16: note = Synthetic oligonucleotide
  source 1..16: mol_type = other DNA
gaccatgccttagaag

SEQ ID NO: 231 - DNA, 16 bp, synthetic construct
  misc_feature 1..16: note = Synthetic oligonucleotide
  source 1..16: mol_type = other DNA
aaatgtctgcttgctt

SEQ ID NO: 232 - DNA, 16 bp, synthetic construct
  misc_feature 1..16: note = Synthetic oligonucleotide
  source 1..16: mol_type = other DNA
agaaaagttggctgta

SEQ ID NO: 233 - DNA, 16 bp, synthetic construct
  misc_feature 1..16: note = Synthetic oligonucleotide
  source 1..16: mol_type = other DNA
aggtctagaaaagttg

SEQ ID NO: 234 - DNA, 16 bp, synthetic construct
  misc_feature 1..16: note = Synthetic oligonucleotide
  source 1..16: mol_type = other DNA
aagcaaaacaggtcta

SEQ ID NO: 235 - DNA, 16 bp, synthetic construct
  misc_feature 1..16: note = Synthetic oligonucleotide
  source 1..16: mol_type = other DNA
aacccagaataaatat

SEQ ID NO: 236 - DNA, 16 bp, synthetic construct
  misc_feature 1..16: note = Synthetic oligonucleotide
  source 1..16: mol_type = other DNA
cactctgtgacacaaa

SEQ ID NO: 237 - DNA, 16 bp, synthetic construct
  misc_feature 1..16: note = Synthetic oligonucleotide
  source 1..16: mol_type = other DNA
tgtcccactctgtgac

SEQ ID NO: 238 - DNA, 16 bp, synthetic construct
  misc_feature 1..16: note = Synthetic oligonucleotide
  source 1..16: mol_type = other DNA
tgtcactggagctcct

SEQ ID NO: 239 - DNA, 16 bp, synthetic construct
  misc_feature 1..16: note = Synthetic oligonucleotide
  source 1..16: mol_type = other DNA
gggctgtcactggagc

SEQ ID NO: 240 - DNA, 16 bp, synthetic construct
  misc_feature 1..16: note = Synthetic oligonucleotide
  source 1..16: mol_type = other DNA
acaagtcggaaccatt

SEQ ID NO: 241 - DNA, 16 bp, synthetic construct
  misc_feature 1..16: note = Synthetic oligonucleotide
  source 1..16: mol_type = other DNA
gagggacaagtcggaa

SEQ ID NO: 242 - DNA, 16 bp, synthetic construct
  misc_feature 1..16: note = Synthetic oligonucleotide
  source 1..16: mol_type = other DNA
tctccgccaggccagt

SEQ ID NO: 243 - DNA, 16 bp, synthetic construct
  misc_feature 1..16: note = Synthetic oligonucleotide
  source 1..16: mol_type = other DNA
agcatctccgccaggc

SEQ ID NO: 244 - DNA, 16 bp, synthetic construct
  misc_feature 1..16: note = Synthetic oligonucleotide
  source 1..16: mol_type = other DNA
tagaagcatctccgcc

SEQ ID NO: 245 - DNA, 16 bp, synthetic construct
  misc_feature 1..16: note = Synthetic oligonucleotide
  source 1..16: mol_type = other DNA
catgccttagaagcat

SEQ ID NO: 246 - DNA, 16 bp, synthetic construct
  misc_feature 1..16: note = Synthetic oligonucleotide
  source 1..16: mol_type = other DNA
ccgaccatgccttaga

SEQ ID NO: 247 - DNA, 16 bp, synthetic construct
  misc_feature 1..16: note = Synthetic oligonucleotide
  source 1..16: mol_type = other DNA
taaatgtctgcttgct

SEQ ID NO: 248 - DNA, 16 bp, synthetic construct
  misc_feature 1..16: note = Synthetic oligonucleotide
  source 1..16: mol_type = other DNA
ctagaaaagttggctg

SEQ ID NO: 249 - DNA, 16 bp, synthetic construct
  misc_feature 1..16: note = Synthetic oligonucleotide
  source 1..16: mol_type = other DNA
caggtctagaaaagtt

SEQ ID NO: 250 - DNA, 16 bp, synthetic construct
  misc_feature 1..16: note = Synthetic oligonucleotide
  source 1..16: mol_type = other DNA
aaagcaaaacaggtct

SEQ ID NO: 251 - DNA, 16 bp, synthetic construct
  misc_feature 1..16: note = Synthetic oligonucleotide
  source 1..16: mol_type = other DNA
tgccgtccttcccacc

SEQ ID NO: 252 - DNA, 16 bp, synthetic construct
  misc_feature 1..16: note = Synthetic oligonucleotide
  source 1..16: mol_type = other DNA
gcatctgccgtccttc

SEQ ID NO: 253 - DNA, 16 bp, synthetic construct
  misc_feature 1..16: note = Synthetic oligonucleotide
  source 1..16: mol_type = other DNA
tcccagcatctgccgt

SEQ ID NO: 254 - DNA, 16 bp, synthetic construct
  misc_feature 1..16: note = Synthetic oligonucleotide
  source 1..16: mol_type = other DNA
gacttgtcaagcacca

SEQ ID NO: 255 - DNA, 16 bp, synthetic construct
  misc_feature 1..16: note = Synthetic oligonucleotide
  source 1..16: mol_type = other DNA
aagtgacttgtcaagc

SEQ ID NO: 256 - DNA, 16 bp, synthetic construct
  misc_feature 1..16: note = Synthetic oligonucleotide
  source 1..16: mol_type = other DNA
cattgtaagttcactc

SEQ ID NO: 257 - DNA, 16 bp, synthetic construct
  misc_feature 1..16: note = Synthetic oligonucleotide
  source 1..16: mol_type = other DNA
cttgcattgtaagttc

SEQ ID NO: 258 - DNA, 16 bp, synthetic construct
  misc_feature 1..16: note = Synthetic oligonucleotide
  source 1..16: mol_type = other DNA
tttcccagctctgtat

SEQ ID NO: 259 - DNA, 16 bp, synthetic construct
  misc_feature 1..16: note = Synthetic oligonucleotide
  source 1..16: mol_type = other DNA
tctggttttcccagct

SEQ ID NO: 260 - DNA, 16 bp, synthetic construct
  misc_feature 1..16: note = Synthetic oligonucleotide
  source 1..16: mol_type = other DNA
cacctctggttttccc

SEQ ID NO: 261 - DNA, 16 bp, synthetic construct
  misc_feature 1..16: note = Synthetic oligonucleotide
  source 1..16: mol_type = other DNA
cttccacctctggttt

SEQ ID NO: 262 - DNA, 16 bp, synthetic construct
  misc_feature 1..16: note = Synthetic oligonucleotide
  source 1..16: mol_type = other DNA
tcttgtctgctccaac

SEQ ID NO: 263 - DNA, 16 bp, synthetic construct
  misc_feature 1..16: note = Synthetic oligonucleotide
  source 1..16: mol_type = other DNA
tagctcttgtctgctc

SEQ ID NO: 264 - DNA, 16 bp, synthetic construct
  misc_feature 1..16: note = Synthetic oligonucleotide
  source 1..16: mol_type = other DNA
accctaggtgtacttt

SEQ ID NO: 265 - DNA, 16 bp, synthetic construct
  misc_feature 1..16: note = Synthetic oligonucleotide
  source 1..16: mol_type = other DNA
acctgcaagtccctgc

SEQ ID NO: 266 - DNA, 16 bp, synthetic construct
  misc_feature 1..16: note = Synthetic oligonucleotide
  source 1..16: mol_type = other DNA
tgccacctgcaagtcc

SEQ ID NO: 267 - DNA, 16 bp, synthetic construct
  misc_feature 1..16: note = Synthetic oligonucleotide
  source 1..16: mol_type = other DNA
cattctctcctcaggc

SEQ ID NO: 268 - DNA, 16 bp, synthetic construct
  misc_feature 1..16: note = Synthetic oligonucleotide
  source 1..16: mol_type = other DNA
ggacccaccacattgc

SEQ ID NO: 269 - DNA, 16 bp, synthetic construct
  misc_feature 1..16: note = Synthetic oligonucleotide
  source 1..16: mol_type = other DNA
gcatggacccaccaca

SEQ ID NO: 270 - DNA, 16 bp, synthetic construct
  misc_feature 1..16: note = Synthetic oligonucleotide
  source 1..16: mol_type = other DNA
tgttgcatggacccac

SEQ ID NO: 271 - DNA, 16 bp, synthetic construct
  misc_feature 1..16: note = Synthetic oligonucleotide
  source 1..16: mol_type = other DNA
cagtagccccccaact

SEQ ID NO: 272 - DNA, 16 bp, synthetic construct
  misc_feature 1..16: note = Synthetic oligonucleotide
  source 1..16: mol_type = other DNA
cacacagtagcccccc

SEQ ID NO: 273 - DNA, 16 bp, synthetic construct
  misc_feature 1..16: note = Synthetic oligonucleotide
  source 1..16: mol_type = other DNA
aagtcacacagtagcc

SEQ ID NO: 274 - DNA, 16 bp, synthetic construct
  misc_feature 1..16: note = Synthetic oligonucleotide
  source 1..16: mol_type = other DNA
gtcacacagtttgggt

SEQ ID NO: 275 - DNA, 16 bp, synthetic construct
  misc_feature 1..16: note = Synthetic oligonucleotide
  source 1..16: mol_type = other DNA
catatgcaaggtcaca

SEQ ID NO: 276 - DNA, 16 bp, synthetic construct
  misc_feature 1..16: note = Synthetic oligonucleotide
  source 1..16: mol_type = other DNA
tcagacatatgcaagg

SEQ ID NO: 277 - DNA, 16 bp, synthetic construct
  misc_feature 1..16: note = Synthetic oligonucleotide
  source 1..16: mol_type = other DNA
gtgtccctcttggtct

SEQ ID NO: 278 - DNA, 16 bp, synthetic construct
  misc_feature 1..16: note = Synthetic oligonucleotide
  source 1..16: mol_type = other DNA
gccagtgtccctcttg

SEQ ID NO: 279 - DNA, 16 bp, synthetic construct
  misc_feature 1..16: note = Synthetic oligonucleotide
  source 1..16: mol_type = other DNA
cctctgccagtgtccc

SEQ ID NO: 280 - DNA, 16 bp, synthetic construct
  misc_feature 1..16: note = Synthetic oligonucleotide
  source 1..16: mol_type = other DNA
ctgtgatcctctgcca

SEQ ID NO: 281 - DNA, 16 bp, synthetic construct
  misc_feature 1..16: note = Synthetic oligonucleotide
  source 1..16: mol_type = other DNA
gtctctgtgatcctct

SEQ ID NO: 282 - DNA, 16 bp, synthetic construct
  misc_feature 1..16: note = Synthetic oligonucleotide
  source 1..16: mol_type = other DNA
gctctagggcccatgc

SEQ ID NO: 283 - DNA, 16 bp, synthetic construct
  misc_feature 1..16: note = Synthetic oligonucleotide
  source 1..16: mol_type = other DNA
gccagctctagggccc

SEQ ID NO: 284 - DNA, 16 bp, synthetic construct
  misc_feature 1..16: note = Synthetic oligonucleotide
  source 1..16: mol_type = other DNA
agagaaatgcatgcta

SEQ ID NO: 285 - DNA, 16 bp, synthetic construct
  misc_feature 1..16: note = Synthetic oligonucleotide
  source 1..16: mol_type = other DNA
ggcgcacagtgggtgc

SEQ ID NO: 286 - DNA, 16 bp, synthetic construct
  misc_feature 1..16: note = Synthetic oligonucleotide
  source 1..16: mol_type = other DNA
tggttaataatgcccc

SEQ ID NO: 287 - DNA, 16 bp, synthetic construct
  misc_feature 1..16: note = Synthetic oligonucleotide
  source 1..16: mol_type = other DNA
ttgcctggttaataat

SEQ ID NO: 288 - DNA, 16 bp, synthetic construct
  misc_feature 1..16: note = Synthetic oligonucleotide
  source 1..16: mol_type = other DNA
tctgagtgtgttagga

SEQ ID NO: 289 - DNA, 16 bp, synthetic construct
  misc_feature 1..16: note = Synthetic oligonucleotide
  source 1..16: mol_type = other DNA
gctctctgagtgtgtt

SEQ ID NO: 290 - DNA, 16 bp, synthetic construct
  misc_feature 1..16: note = Synthetic oligonucleotide
  source 1..16: mol_type = other DNA
catgctgagcaggtcc

SEQ ID NO: 291 - DNA, 16 bp, synthetic construct
  misc_feature 1..16: note = Synthetic oligonucleotide
  source 1..16: mol_type = other DNA
gtagcatgctgagcag

SEQ ID NO: 292 - DNA, 16 bp, synthetic construct
  misc_feature 1..16: note = Synthetic oligonucleotide
  source 1..16: mol_type = other DNA
tcagtggctgctctga

SEQ ID NO: 293 - DNA, 16 bp, synthetic construct
  misc_feature 1..16: note = Synthetic oligonucleotide
  source 1..16: mol_type = other DNA
gcaattcagtggctgc

SEQ ID NO: 294 - DNA, 16 bp, synthetic construct
  misc_feature 1..16: note = Synthetic oligonucleotide
  source 1..16: mol_type = other DNA
tagttaacacacagaa

SEQ ID NO: 295 - DNA, 16 bp, synthetic construct
  misc_feature 1..16: note = Synthetic oligonucleotide
  source 1..16: mol_type = other DNA
aactatttagcagcta

SEQ ID NO: 296 - DNA, 16 bp, synthetic construct
  misc_feature 1..16: note = Synthetic oligonucleotide
  source 1..16: mol_type = other DNA
cgtcaactatttagca

SEQ ID NO: 297 - DNA, 16 bp, synthetic construct
  misc_feature 1..16: note = Synthetic oligonucleotide
  source 1..16: mol_type = other DNA
cctaggttaccgctgt

SEQ ID NO: 298 - DNA, 16 bp, synthetic construct
  misc_feature 1..16: note = Synthetic oligonucleotide
  source 1..16: mol_type = other DNA
gcacagaccctgactg

SEQ ID NO: 299 - DNA, 16 bp, synthetic construct
  misc_feature 1..16: note = Synthetic oligonucleotide
  source 1..16: mol_type = other DNA
agcactgtcctgcagc

SEQ ID NO: 300 - DNA, 16 bp, synthetic construct
  misc_feature 1..16: note = Synthetic oligonucleotide
  source 1..16: mol_type = other DNA
ttttgctggtttgaga

SEQ ID NO: 301 - DNA, 16 bp, synthetic construct
  misc_feature 1..16: note = Synthetic oligonucleotide
  source 1..16: mol_type = other DNA
acttttttgctggttt

SEQ ID NO: 302 - DNA, 16 bp, synthetic construct
  misc_feature 1..16: note = Synthetic oligonucleotide
  source 1..16: mol_type = other DNA
attccacttttttgct

SEQ ID NO: 303 - DNA, 16 bp, synthetic construct
  misc_feature 1..16: note = Synthetic oligonucleotide
  source 1..16: mol_type = other DNA
tctgtgcactatcctg

SEQ ID NO: 304 - DNA, 16 bp, synthetic construct
  misc_feature 1..16: note = Synthetic oligonucleotide
  source 1..16: mol_type = other DNA
ggcatctgtgcactat

SEQ ID NO: 305 - DNA, 16 bp, synthetic construct
  misc_feature 1..16: note = Synthetic oligonucleotide
  source 1..16: mol_type = other DNA
tcacacgagcattaag

SEQ ID NO: 306 - DNA, 16 bp, synthetic construct
  misc_feature 1..16: note = Synthetic oligonucleotide
  source 1..16: mol_type = other DNA
tgcctctcacacgagc

SEQ ID NO: 307 - DNA, 16 bp, synthetic construct
  misc_feature 1..16: note = Synthetic oligonucleotide
  source 1..16: mol_type = other DNA
tagacaggatcaactc

SEQ ID NO: 308 - DNA, 16 bp, synthetic construct
  misc_feature 1..16: note = Synthetic oligonucleotide
  source 1..16: mol_type = other DNA
gttttcgacacagggt

SEQ ID NO: 309 - DNA, 16 bp, synthetic construct
  misc_feature 1..16: note = Synthetic oligonucleotide
  source 1..16: mol_type = other DNA
gcatgttttcgacaca

SEQ ID NO: 310 - DNA, 16 bp, synthetic construct
  misc_feature 1..16: note = Synthetic oligonucleotide
  source 1..16: mol_type = other DNA
atcttttcagtactct

SEQ ID NO: 311 - DNA, 16 bp, synthetic construct
  misc_feature 1..16: note = Synthetic oligonucleotide
  source 1..16: mol_type = other DNA
tcgcatcttttcagta

SEQ ID NO: 312 - DNA, 16 bp, synthetic construct
  misc_feature 1..16: note = Synthetic oligonucleotide
  source 1..16: mol_type = other DNA
agcagctaggccacag

SEQ ID NO: 313 - DNA, 16 bp, synthetic construct
  misc_feature 1..16: note = Synthetic oligonucleotide
  source 1..16: mol_type = other DNA
aacttcaaggccagct

SEQ ID NO: 314 - DNA, 16 bp, synthetic construct
  misc_feature 1..16: note = Synthetic oligonucleotide
  source 1..16: mol_type = other DNA
ctgaactgaacggcgg

SEQ ID NO: 315 - DNA, 16 bp, synthetic construct
  misc_feature 1..16: note = Synthetic oligonucleotide
  source 1..16: mol_type = other DNA
ggcgaggagacctaga

SEQ ID NO: 316 - DNA, 16 bp, synthetic construct
  misc_feature 1..16: note = Synthetic oligonucleotide
  source 1..16: mol_type = other DNA
acgcaaggctagcacc

SEQ ID NO: 317 - DNA, 16 bp, synthetic construct
  misc_feature 1..16: note = Synthetic oligonucleotide
  source 1..16: mol_type = other DNA
ggcaagcccgctttct

SEQ ID NO: 318 - DNA, 16 bp, synthetic construct
  misc_feature 1..16: note = Synthetic oligonucleotide
  source 1..16: mol_type = other DNA
cccttttaaagattag

SEQ ID NO: 319 - DNA, 16 bp, synthetic construct
  misc_feature 1..16: note = Synthetic oligonucleotide
  source 1..16: mol_type = other DNA
ccagagaagaaacatc

SEQ ID NO: 320 - DNA, 16 bp, synthetic construct
  misc_feature 1..16: note = Synthetic oligonucleotide
  source 1..16: mol_type = other DNA
aagaatctggagctgc

SEQ ID NO: 321 - DNA, 16 bp, synthetic construct
  misc_feature 1..16: note = Synthetic oligonucleotide
  source 1..16: mol_type = other DNA
cactgaggaccaaatt

SEQ ID NO: 322 - DNA, 16 bp, synthetic construct
  misc_feature 1..16: note = Synthetic oligonucleotide
  source 1..16: mol_type = other DNA
gctatataaaggaata

SEQ ID NO: 323 - DNA, 16 bp, synthetic construct
  misc_feature 1..16: note = Synthetic oligonucleotide
  source 1..16: mol_type = other DNA
catgagcaagtcactc

SEQ ID NO: 324 - DNA, 16 bp, synthetic construct
  misc_feature 1..16: note = Synthetic oligonucleotide
  source 1..16: mol_type = other DNA
agtatagtagatgata

SEQ ID NO: 325 - DNA, 16 bp, synthetic construct
  misc_feature 1..16: note = Synthetic oligonucleotide
  source 1..16: mol_type = other DNA
cgagaggtgggtctcc

SEQ ID NO: 326 - DNA, 16 bp, synthetic construct
  misc_feature 1..16: note = Synthetic oligonucleotide
  source 1..16: mol_type = other DNA
gtgaggtatccccggc

SEQ ID NO: 327 - DNA, 16 bp, synthetic construct
  misc_feature 1..16: note = Synthetic oligonucleotide
  source 1..16: mol_type = other DNA
gacatgcaggatcttg

SEQ ID NO: 328 - DNA, 16 bp, synthetic construct
  misc_feature 1..16: note = Synthetic oligonucleotide
  source 1..16: mol_type = other DNA
gggaattctatacaga

SEQ ID NO: 329 - DNA, 16 bp, synthetic construct
  misc_feature 1..16: note = Synthetic oligonucleotide
  source 1..16: mol_type = other DNA
caccgaagatgtgaca

SEQ ID NO: 330 - DNA, 16 bp, synthetic construct
  misc_feature 1..16: note = Synthetic oligonucleotide
  source 1..16: mol_type = other DNA
aagggaaaggcctgag

SEQ ID NO: 331 - DNA, 16 bp, synthetic construct
  misc_feature 1..16: note = Synthetic oligonucleotide
  source 1..16: mol_type = other DNA
ccccacaggcagcctc

SEQ ID NO: 332 - DNA, 16 bp, synthetic construct
  misc_feature 1..16: note = Synthetic oligonucleotide
  source 1..16: mol_type = other DNA
ccggaggacagactag

SEQ ID NO: 333 - DNA, 16 bp, synthetic construct
  misc_feature 1..16: note = Synthetic oligonucleotide
  source 1..16: mol_type = other DNA
tggtattcatccgccc

SEQ ID NO: 334 - DNA, 16 bp, synthetic construct
  misc_feature 1..16: note = Synthetic oligonucleotide
  source 1..16: mol_type = other DNA
agccaaacggagctgg

SEQ ID NO: 335 - DNA, 16 bp, synthetic construct
  misc_feature 1..16: note = Synthetic oligonucleotide
  source 1..16: mol_type = other DNA
aaaggaacaggctctt

SEQ ID NO: 336 - DNA, 16 bp, synthetic construct
  misc_feature 1..16: note = Synthetic oligonucleotide
  source 1..16: mol_type = other DNA
ctctagggcccatgct

SEQ ID NO: 337 - DNA, 16 bp, synthetic construct
  misc_feature 1..16: note = Synthetic oligonucleotide
  source 1..16: mol_type = other DNA
ggatacacaggctcgc

SEQ ID NO: 338 - DNA, 16 bp, synthetic construct
  misc_feature 1..16: note = Synthetic oligonucleotide
  source 1..16: mol_type = other DNA
gatgatgtgaccactg

SEQ ID NO: 339 - DNA, 16 bp, synthetic construct
  misc_feature 1..16: note = Synthetic oligonucleotide
  source 1..16: mol_type = other DNA
ggccagcaaggtgggc

SEQ ID NO: 340 - DNA, 16 bp, synthetic construct
  misc_feature 1..16: note = Synthetic oligonucleotide
  source 1..16: mol_type = other DNA
tgctagtaggtctggg

SEQ ID NO: 341 - DNA, 16 bp, synthetic construct
  misc_feature 1..16: note = Synthetic oligonucleotide
  source 1..16: mol_type = other DNA
ccaaaggaagacttca

SEQ ID NO: 342 - DNA, 16 bp, synthetic construct
  misc_feature 1..16: note = Synthetic oligonucleotide
  source 1..16: mol_type = other DNA
atttaaagactcaaag

SEQ ID NO: 343 - DNA, 16 bp, synthetic construct
  misc_feature 1..16: note = Synthetic oligonucleotide
  source 1..16: mol_type = other DNA
acatttgtgggagagg

SEQ ID NO: 344 - DNA, 16 bp, synthetic construct
  misc_feature 1..16: note = Synthetic oligonucleotide
  source 1..16: mol_type = other DNA
cgtcctcctcgggcac

SEQ ID NO: 345 - DNA, 16 bp, synthetic construct
  misc_feature 1..16: note = Synthetic oligonucleotide
  source 1..16: mol_type = other DNA
tcacacttgctggcct

SEQ ID NO: 346 - DNA, 16 bp, synthetic construct
  misc_feature 1..16: note = Synthetic oligonucleotide
  source 1..16: mol_type = other DNA
atcccggccgctgacc

SEQ ID NO: 347 - DNA, 16 bp, synthetic construct
  misc_feature 1..16: note = Synthetic oligonucleotide
  source 1..16: mol_type = other DNA
gctggcacccttggcc

SEQ ID NO: 348 - DNA, 16 bp, synthetic construct
  misc_feature 1..16: note = Synthetic oligonucleotide
  source 1..16: mol_type = other DNA
aagacataaagacatc

SEQ ID NO: 349 - DNA, 16 bp, synthetic construct
  misc_feature 1..16: note = Synthetic oligonucleotide
  source 1..16: mol_type = other DNA
cagaaggttattgatt

SEQ ID NO: 350 - DNA, 16 bp, synthetic construct
  misc_feature 1..16: note = Synthetic oligonucleotide
  source 1..16: mol_type = other DNA
tgctagttattaagca

SEQ ID NO: 351 - DNA, 16 bp, synthetic construct
  misc_feature 1..16: note = Synthetic oligonucleotide
  source 1..16: mol_type = other DNA
cagtaacagctctttt

SEQ ID NO: 352 - DNA, 16 bp, synthetic construct
  misc_feature 1..16: note = Synthetic oligonucleotide
  source 1..16: mol_type = other DNA
ccttattatccctttc

SEQ ID NO: 353 - DNA, 16 bp, synthetic construct
  misc_feature 1..16: note = Synthetic oligonucleotide
  source 1..16: mol_type = other DNA
caacatcaaattctgc

SEQ ID NO: 354 - DNA, 16 bp, synthetic construct
  misc_feature 1..16: note = Synthetic oligonucleotide
  source 1..16: mol_type = other DNA
ttccgaataaactcca

SEQ ID NO: 355 - DNA, 16 bp, synthetic construct
  misc_feature 1..16: note = Synthetic oligonucleotide
  source 1..16: mol_type = other DNA
acctcgggagctgagg

SEQ ID NO: 356 - DNA, 16 bp, synthetic construct
  misc_feature 1..16: note = Synthetic oligonucleotide
  source 1..16: mol_type = other DNA
gatggaggtttcgagc

SEQ ID NO: 357 - DNA, 16 bp, synthetic construct
  misc_feature 1..16: note = Synthetic oligonucleotide
  source 1..16: mol_type = other DNA
tatcaagtggttctaa

SEQ ID NO: 358 - DNA, 16 bp, synthetic construct
  misc_feature 1..16: note = Synthetic oligonucleotide
  source 1..16: mol_type = other DNA
caccaatgatgtcctc

SEQ ID NO: 359 - DNA, 16 bp, synthetic construct
  misc_feature 1..16: note = Synthetic oligonucleotide
  source 1..16: mol_type = other DNA
tcttatcggccaggtg

SEQ ID NO: 360 - DNA, 16 bp, synthetic construct
  misc_feature 1..16: note = Synthetic oligonucleotide
  source 1..16: mol_type = other DNA
tggcagagaagtggat

SEQ ID NO: 361 - DNA, 16 bp, synthetic construct
  misc_feature 1..16: note = Synthetic oligonucleotide
  source 1..16: mol_type = other DNA
ccatacagtcctgcaa

SEQ ID NO: 362 - DNA, 16 bp, synthetic construct
  misc_feature 1..16: note = Synthetic oligonucleotide
  source 1..16: mol_type = other DNA
gagcagctcagcagct

SEQ ID NO: 363 - DNA, 16 bp, synthetic construct
  misc_feature 1..16: note = Synthetic oligonucleotide
  source 1..16: mol_type = other DNA
tacagaagagctggag

SEQ ID NO: 364 - DNA, 16 bp, synthetic construct
  misc_feature 1..16: note = Synthetic oligonucleotide
  source 1..16: mol_type = other DNA
acacagagtggtttca

SEQ ID NO: 365 - DNA, 16 bp, synthetic construct
  misc_feature 1..16: note = Synthetic oligonucleotide
  source 1..16: mol_type = other DNA
ctgcagttggcctggg

SEQ ID NO: 366 - DNA, 16 bp, synthetic construct
  misc_feature 1..16: note = Synthetic oligonucleotide
  source 1..16: mol_type = other DNA
gtggcagtggacacgg

SEQ ID NO: 367 - DNA, 16 bp, synthetic construct
  misc_feature 1..16: note = Synthetic oligonucleotide
  source 1..16: mol_type = other DNA
aggagaagtaaggtca

SEQ ID NO: 368 - DNA, 16 bp, synthetic construct
  misc_feature 1..16: note = Synthetic oligonucleotide
  source 1..16: mol_type = other DNA
gggcatgttttcgaca

SEQ ID NO: 369 - DNA, 16 bp, synthetic construct
  misc_feature 1..16: note = Synthetic oligonucleotide
  source 1..16: mol_type = other DNA
ttccacccagagatgg

SEQ ID NO: 370 - DNA, 16 bp, synthetic construct
  misc_feature 1..16: note = Synthetic oligonucleotide
  source 1..16: mol_type = other DNA
cggtatggtggtggca

SEQ ID NO: 371 - DNA, 16 bp, synthetic construct
  misc_feature 1..16: note = Synthetic oligonucleotide
  source 1..16: mol_type = other DNA
gggcaagtggatccaa

SEQ ID NO: 372 - DNA, 16 bp, synthetic construct
  misc_feature 1..16: note = Synthetic oligonucleotide
  source 1..16: mol_type = other DNA
ccacacttcatttctc

SEQ ID NO: 373 - DNA, 16 bp, synthetic construct
  misc_feature 1..16: note = Synthetic oligonucleotide
  source 1..16: mol_type = other DNA
gcaggccacggtcacc

SEQ ID NO: 374 - DNA, 16 bp, synthetic construct
  misc_feature 1..16: note = Synthetic oligonucleotide
  source 1..16: mol_type = other DNA
ttaaagctcagcccca

SEQ ID NO: 375 - DNA, 16 bp, synthetic construct
  misc_feature 1..16: note = Synthetic oligonucleotide
  source 1..16: mol_type = other DNA
ccccggaaaggcggaa

SEQ ID NO: 376 - DNA, 16 bp, synthetic construct
  misc_feature 1..16: note = Synthetic oligonucleotide
  source 1..16: mol_type = other DNA
ccgagcacagctcgac

SEQ ID NO: 377 - DNA, 16 bp, synthetic construct
  misc_feature 1..16: note = Synthetic oligonucleotide
  source 1..16: mol_type = other DNA
acggacatcggcacat

SEQ ID NO: 378 - DNA, 16 bp, synthetic construct
  misc_feature 1..16: note = Synthetic oligonucleotide
  source 1..16: mol_type = other DNA
ggcacggaacaagagc

SEQ ID NO: 379 - DNA, 16 bp, synthetic construct
  misc_feature 1..16: note = Synthetic oligonucleotide
  source 1..16: mol_type = other DNA
acctttcacactcacc

SEQ ID NO: 380 - DNA, 16 bp, synthetic construct
  misc_feature 1..16: note = Synthetic oligonucleotide
  source 1..16: mol_type = other DNA
tgccatccagaaagct

SEQ ID NO: 381 - DNA, 16 bp, synthetic construct
  misc_feature 1..16: note = Synthetic oligonucleotide
  source 1..16: mol_type = other DNA
cacctttgggtgttgc

SEQ ID NO: 382 - DNA, 16 bp, synthetic construct
  misc_feature 1..16: note = Synthetic oligonucleotide
  source 1..16: mol_type = other DNA
ccactgcacactgccg

SEQ ID NO: 383 - DNA, 16 bp, synthetic construct
  misc_feature 1..16: note = Synthetic oligonucleotide
  source 1..16: mol_type = other DNA
tggttccaggtttctt

SEQ ID NO: 384 - DNA, 16 bp, synthetic construct
  misc_feature 1..16: note = Synthetic oligonucleotide
  source 1..16: mol_type = other DNA
cctgctgtgtgagctt

SEQ ID NO: 385 - DNA, 16 bp, synthetic construct
  misc_feature 1..16: note = Synthetic oligonucleotide
  source 1..16: mol_type = other DNA
cttcagagccagccca

SEQ ID NO: 386 - DNA, 16 bp, synthetic construct
  misc_feature 1..16: note = Synthetic oligonucleotide
  source 1..16: mol_type = other DNA
ccgagcttcctggtct

SEQ ID NO: 387 - DNA, 16 bp, synthetic construct
  misc_feature 1..16: note = Synthetic oligonucleotide
  source 1..16: mol_type = other DNA
gggtgataacggaaaa

SEQ ID NO: 388 - DNA, 16 bp, synthetic construct
  misc_feature 1..16: note = Synthetic oligonucleotide
  source 1..16: mol_type = other DNA
aaagataaatgtctgc

SEQ ID NO: 389 - DNA, 16 bp, synthetic construct
  misc_feature 1..16: note = Synthetic oligonucleotide
  source 1..16: mol_type = other DNA
cccagaataaatatct

SEQ ID NO: 390 - DNA, 16 bp, synthetic construct
  misc_feature 1..16: note = Synthetic oligonucleotide
  source 1..16: mol_type = other DNA
ctccaggctcagaccc

SEQ ID NO: 391 - DNA, 16 bp, synthetic construct
  misc_feature 1..16: note = Synthetic oligonucleotide
  source 1..16: mol_type = other DNA
gcccatgagggccagg

SEQ ID NO: 392 - DNA, 16 bp, synthetic construct
  misc_feature 1..16: note = Synthetic oligonucleotide
  source 1..16: mol_type = other DNA
aacgcaaggctagcac

SEQ ID NO: 393 - DNA, 16 bp, synthetic construct
  misc_feature 1..16: note = Synthetic oligonucleotide
  source 1..16: mol_type = other DNA
ctataatggcaagccc

SEQ ID NO: 394 - DNA, 16 bp, synthetic construct
  misc_feature 1..16: note = Synthetic oligonucleotide
  source 1..16: mol_type = other DNA
cgtagggacgattgtc

SEQ ID NO: 395 - DNA, 16 bp, synthetic construct
  misc_feature 1..16: note = Synthetic oligonucleotide
  source 1..16: mol_type = other DNA
atgaacttgaggaggc

SEQ ID NO: 396 - DNA, 16 bp, synthetic construct
  misc_feature 1..16: note = Synthetic oligonucleotide
  source 1..16: mol_type = other DNA
ttggaagaatctggag

SEQ ID NO: 397 - DNA, 16 bp, synthetic construct
  misc_feature 1..16: note = Synthetic oligonucleotide
  source 1..16: mol_type = other DNA
caacactgaggaccaa

SEQ ID NO: 398 - DNA, 16 bp, synthetic construct
  misc_feature 1..16: note = Synthetic oligonucleotide
  source 1..16: mol_type = other DNA
ggcaacacttcttaaa

SEQ ID NO: 399 - DNA, 16 bp, synthetic construct
  misc_feature 1..16: note = Synthetic oligonucleotide
  source 1..16: mol_type = other DNA
gtgcagccatgagcaa

SEQ ID NO: 400 - DNA, 16 bp, synthetic construct
  misc_feature 1..16: note = Synthetic oligonucleotide
  source 1..16: mol_type = other DNA
acagagtatagtagat

SEQ ID NO: 401 - DNA, 16 bp, synthetic construct
  misc_feature 1..16: note = Synthetic oligonucleotide
  source 1..16: mol_type = other DNA
tgcgagaggtgggtct

SEQ ID NO: 402 - DNA, 16 bp, synthetic construct
  misc_feature 1..16: note = Synthetic oligonucleotide
  source 1..16: mol_type = other DNA
ggtgaggtatccccgg

SEQ ID NO: 403 - DNA, 16 bp, synthetic construct
  misc_feature 1..16: note = Synthetic oligonucleotide
  source 1..16: mol_type = other DNA
agacatgcaggatctt

SEQ ID NO: 404 - DNA, 16 bp, synthetic construct
  misc_feature 1..16: note = Synthetic oligonucleotide
  source 1..16: mol_type = other DNA
tcaaatgaagatagac

SEQ ID NO: 405 - DNA, 16 bp, synthetic construct
  misc_feature 1..16: note = Synthetic oligonucleotide
  source 1..16: mol_type = other DNA
gaatacccagtcccct

SEQ ID NO: 406 - DNA, 16 bp, synthetic construct
  misc_feature 1..16: note = Synthetic oligonucleotide
  source 1..16: mol_type = other DNA
ctcaagggaaaggcct

SEQ ID NO: 407 - DNA, 16 bp, synthetic construct
  misc_feature 1..16: note = Synthetic oligonucleotide
  source 1..16: mol_type = other DNA
catggcagcggtgaac

SEQ ID NO: 408 - DNA, 16 bp, synthetic construct
  misc_feature 1..16: note = Synthetic oligonucleotide
  source 1..16: mol_type = other DNA
gatcaaacctgtcccc

SEQ ID NO: 409 - DNA, 16 bp, synthetic construct
  misc_feature 1..16: note = Synthetic oligonucleotide
  source 1..16: mol_type = other DNA
tgcagaccgttttcca

SEQ ID NO: 410 - DNA, 16 bp, synthetic construct
  misc_feature 1..16: note = Synthetic oligonucleotide
  source 1..16: mol_type = other DNA
ggaaaggaacaggctc

SEQ ID NO: 411 - DNA, 16 bp, synthetic construct
  misc_feature 1..16: note = Synthetic oligonucleotide
  source 1..16: mol_type = other DNA
tttgagggcggcagcc

SEQ ID NO: 412 - DNA, 16 bp, synthetic construct
  misc_feature 1..16: note = Synthetic oligonucleotide
  source 1..16: mol_type = other DNA
tgctggatacacaggc

SEQ ID NO: 413 - DNA, 16 bp, synthetic construct
  misc_feature 1..16: note = Synthetic oligonucleotide
  source 1..16: mol_type = other DNA
tgtacctgggttctgc

SEQ ID NO: 414 - DNA, 16 bp, synthetic construct
  misc_feature 1..16: note = Synthetic oligonucleotide
  source 1..16: mol_type = other DNA
cactagatattgagct

SEQ ID NO: 415 - DNA, 16 bp, synthetic construct
  misc_feature 1..16: note = Synthetic oligonucleotide
  source 1..16: mol_type = other DNA
ctatgctagtaggtct

SEQ ID NO: 416 - DNA, 16 bp, synthetic construct
  misc_feature 1..16: note = Synthetic oligonucleotide
  source 1..16: mol_type = other DNA
ggccaaaggaagactt

SEQ ID NO: 417 - DNA, 16 bp, synthetic construct
  misc_feature 1..16: note = Synthetic oligonucleotide
  source 1..16: mol_type = other DNA
ctgcaagaaagacaac

SEQ ID NO: 418 - DNA, 16 bp, synthetic construct
  misc_feature 1..16: note = Synthetic oligonucleotide
  source 1..16: mol_type = other DNA
caccaggctgcctccg

SEQ ID NO: 419 - DNA, 16 bp, synthetic construct
  misc_feature 1..16: note = Synthetic oligonucleotide
  source 1..16: mol_type = other DNA
ccgtcctcctcgggca

SEQ ID NO: 420 - DNA, 16 bp, synthetic construct
  misc_feature 1..16: note = Synthetic oligonucleotide
  source 1..16: mol_type = other DNA
catcagacggccgtgc

SEQ ID NO: 421 - DNA, 16 bp, synthetic construct
  misc_feature 1..16: note = Synthetic oligonucleotide
  source 1..16: mol_type = other DNA
gtcacacttgctggcc

SEQ ID NO: 422 - DNA, 16 bp, synthetic construct
  misc_feature 1..16: note = Synthetic oligonucleotide
  source 1..16: mol_type = other DNA
gcatcccggccgctga

SEQ ID NO: 423 - DNA, 16 bp, synthetic construct
  misc_feature 1..16: note = Synthetic oligonucleotide
  source 1..16: mol_type = other DNA
gcgcatgctggcaccc

SEQ ID NO: 424 - DNA, 16 bp, synthetic construct
  misc_feature 1..16: note = Synthetic oligonucleotide
  source 1..16: mol_type = other DNA
gataacataacaaaag

SEQ ID NO: 425 - DNA, 16 bp, synthetic construct
  misc_feature 1..16: note = Synthetic oligonucleotide
  source 1..16: mol_type = other DNA
gcagaaggttattgat

SEQ ID NO: 426 - DNA, 16 bp, synthetic construct
  misc_feature 1..16: note = Synthetic oligonucleotide
  source 1..16: mol_type = other DNA
acagctgctagttatt

SEQ ID NO: 427 - DNA, 16 bp, synthetic construct
  misc_feature 1..16: note = Synthetic oligonucleotide
  source 1..16: mol_type = other DNA
tgctactgtcaacagt

SEQ ID NO: 428 - DNA, 16 bp, synthetic construct
  misc_feature 1..16: note = Synthetic oligonucleotide
  source 1..16: mol_type = other DNA
caataaccttattatc

SEQ ID NO: 429 - DNA, 16 bp, synthetic construct
  misc_feature 1..16: note = Synthetic oligonucleotide
  source 1..16: mol_type = other DNA
agagaacagactgagg

SEQ ID NO: 430 - DNA, 16 bp, synthetic construct
  misc_feature 1..16: note = Synthetic oligonucleotide
  source 1..16: mol_type = other DNA
ggcttttccgaataaa

SEQ ID NO: 431 - DNA, 16 bp, synthetic construct
  misc_feature 1..16: note = Synthetic oligonucleotide
  source 1..16: mol_type = other DNA
ggcagaggacgcaggg

SEQ ID NO: 432 - DNA, 16 bp, synthetic construct
  misc_feature 1..16: note = Synthetic oligonucleotide
  source 1..16: mol_type = other DNA
actattcggtgtatca

SEQ ID NO: 433 - DNA, 16 bp, synthetic construct
  misc_feature 1..16: note = Synthetic oligonucleotide
  source 1..16: mol_type = other DNA
gctggaggcaccaatg

SEQ ID NO: 434 - DNA, 16 bp, synthetic construct
  misc_feature 1..16: note = Synthetic oligonucleotide
  source 1..16: mol_type = other DNA
gtcttatcggccaggt

SEQ ID NO: 435 - DNA, 16 bp, synthetic construct
  misc_feature 1..16: note = Synthetic oligonucleotide
  source 1..16: mol_type = other DNA
tgacatctttggcaga

SEQ ID NO: 436 - DNA, 16 bp, synthetic construct
  misc_feature 1..16: note = Synthetic oligonucleotide
  source 1..16: mol_type = other DNA
accatacagtcctgca

SEQ ID NO: 437 - DNA, 16 bp, synthetic construct
  misc_feature 1..16: note = Synthetic oligonucleotide
  source 1..16: mol_type = other DNA
gaaactggagcagctc

SEQ ID NO: 438 - DNA, 16 bp, synthetic construct
  misc_feature 1..16: note = Synthetic oligonucleotide
  source 1..16: mol_type = other DNA
cattgaaaatccatcc

SEQ ID NO: 439 - DNA, 16 bp, synthetic construct
  misc_feature 1..16: note = Synthetic oligonucleotide
  source 1..16: mol_type = other DNA
cccaaggaagactgtt

SEQ ID NO: 440 - DNA, 16 bp, synthetic construct
  misc_feature 1..16: note = Synthetic oligonucleotide
  source 1..16: mol_type = other DNA
cctcagctggtggagc

SEQ ID NO: 441 - DNA, 16 bp, synthetic construct
  misc_feature 1..16: note = Synthetic oligonucleotide
  source 1..16: mol_type = other DNA
ggtggcagtggacacg

SEQ ID NO: 442 - DNA, 16 bp, synthetic construct
  misc_feature 1..16: note = Synthetic oligonucleotide
  source 1..16: mol_type = other DNA
aggtaatacctttttc

SEQ ID NO: 443 - DNA, 16 bp, synthetic construct
  misc_feature 1..16: note = Synthetic oligonucleotide
  source 1..16: mol_type = other DNA
caccatcccttgatgc

SEQ ID NO: 444 - DNA, 16 bp, synthetic construct
  misc_feature 1..16: note = Synthetic oligonucleotide
  source 1..16: mol_type = other DNA
gaaaacaccatctttc

SEQ ID NO: 445 - DNA, 16 bp, synthetic construct
  misc_feature 1..16: note = Synthetic oligonucleotide
  source 1..16: mol_type = other DNA
ggcggtatggtggtgg

SEQ ID NO: 446 - DNA, 16 bp, synthetic construct
  misc_feature 1..16: note = Synthetic oligonucleotide
  source 1..16: mol_type = other DNA
acccagggcaagtgga

SEQ ID NO: 447 - DNA, 16 bp, synthetic construct
  misc_feature 1..16: note = Synthetic oligonucleotide
  source 1..16: mol_type = other DNA
ccccacccacacttca

SEQ ID NO: 448 - DNA, 16 bp, synthetic construct
  misc_feature 1..16: note = Synthetic oligonucleotide
  source 1..16: mol_type = other DNA
tcgcaggccacggtca

SEQ ID NO: 449 - DNA, 16 bp, synthetic construct
  misc_feature 1..16: note = Synthetic oligonucleotide
  source 1..16: mol_type = other DNA
ttttaaagctcagccc

SEQ ID NO: 450 - DNA, 16 bp, synthetic construct
  misc_feature 1..16: note = Synthetic oligonucleotide
  source 1..16: mol_type = other DNA
agcagccccggaaagg

SEQ ID NO: 451 - DNA, 16 bp, synthetic construct
  misc_feature 1..16: note = Synthetic oligonucleotide
  source 1..16: mol_type = other DNA
acccgagcacagctcg

SEQ ID NO: 452 - DNA, 16 bp, synthetic construct
  misc_feature 1..16: note = Synthetic oligonucleotide
  source 1..16: mol_type = other DNA
ccacggacatcggcac

SEQ ID NO: 453 - DNA, 16 bp, synthetic construct
  misc_feature 1..16: note = Synthetic oligonucleotide
  source 1..16: mol_type = other DNA
tggcacggaacaagag

SEQ ID NO: 454 - DNA, 16 bp, synthetic construct
  misc_feature 1..16: note = Synthetic oligonucleotide
  source 1..16: mol_type = other DNA
ggccatcagcaccttt

SEQ ID NO: 455 - DNA, 16 bp, synthetic construct
  misc_feature 1..16: note = Synthetic oligonucleotide
  source 1..16: mol_type = other DNA
ctagatgccatccaga

SEQ ID NO: 456 - DNA, 16 bp, synthetic construct
  misc_feature 1..16: note = Synthetic oligonucleotide
  source 1..16: mol_type = other DNA
ggccacctttgggtgt

SEQ ID NO: 457 - DNA, 16 bp, synthetic construct
  misc_feature 1..16: note = Synthetic oligonucleotide
  source 1..16: mol_type = other DNA
gtgcatgcaccactgc

SEQ ID NO: 458 - DNA, 16 bp, synthetic construct
  misc_feature 1..16: note = Synthetic oligonucleotide
  source 1..16: mol_type = other DNA
ctggttccaggtttct

SEQ ID NO: 459 - DNA, 16 bp, synthetic construct
  misc_feature 1..16: note = Synthetic oligonucleotide
  source 1..16: mol_type = other DNA
tcctgctgtgtgagct

SEQ ID NO: 460 - DNA, 16 bp, synthetic construct
  misc_feature 1..16: note = Synthetic oligonucleotide
  source 1..16: mol_type = other DNA
gaagaggcttggcttc

SEQ ID NO: 461 - DNA, 16 bp, synthetic construct
  misc_feature 1..16: note = Synthetic oligonucleotide
  source 1..16: mol_type = other DNA
accgagcttcctggtc

SEQ ID NO: 462 - DNA, 16 bp, synthetic construct
  misc_feature 1..16: note = Synthetic oligonucleotide
  source 1..16: mol_type = other DNA
ggcctgggtgataacg

SEQ ID NO: 463 - DNA, 16 bp, synthetic construct
  misc_feature 1..16: note = Synthetic oligonucleotide
  source 1..16: mol_type = other DNA
ccaaaagataaatgtc

SEQ ID NO: 464 - DNA, 16 bp, synthetic construct
  misc_feature 1..16: note = Synthetic oligonucleotide
  source 1..16: mol_type = other DNA
tacaaaacccagaata

SEQ ID NO: 465 - DNA, 16 bp, synthetic construct
  misc_feature 1..16: note = Synthetic oligonucleotide
  source 1..16: mol_type = other DNA
caacttcaaggccagc

SEQ ID NO: 466 - DNA, 16 bp, synthetic construct
  misc_feature 1..16: note = Synthetic oligonucleotide
  source 1..16: mol_type = other DNA
gatgacctcgggagct

SEQ ID NO: 467 - DNA, 16 bp, synthetic construct
  misc_feature 1..16: note = Synthetic oligonucleotide
  source 1..16: mol_type = other DNA
caccagagccccatcg

SEQ ID NO: 468 - DNA, 16 bp, synthetic construct
  misc_feature 1..16: note = Synthetic oligonucleotide
  source 1..16: mol_type = other DNA
ctgggagccgctgctg

SEQ ID NO: 469 - DNA, 16 bp, synthetic construct
  misc_feature 1..16: note = Synthetic oligonucleotide
  source 1..16: mol_type = other DNA
tggcagcggccaccag

SEQ ID NO: 470 - DNA, 16 bp, synthetic construct
  misc_feature 1..16: note = Synthetic oligonucleotide
  source 1..16: mol_type = other DNA
ggccaggccgtcctcc

SEQ ID NO: 471 - DNA, 16 bp, synthetic construct
  misc_feature 1..16: note = Synthetic oligonucleotide
  source 1..16: mol_type = other DNA
ccgcaccttggcgcag

SEQ ID NO: 472 - DNA, 16 bp, synthetic construct
  misc_feature 1..16: note = Synthetic oligonucleotide
  source 1..16: mol_type = other DNA
gaaacagatggaatac

SEQ ID NO: 473 - DNA, 16 bp, synthetic construct
  misc_feature 1..16: note = Synthetic oligonucleotide
  source 1..16: mol_type = other DNA
acccagcacactcaga

SEQ ID NO: 474 - DNA, 16 bp, synthetic construct
  misc_feature 1..16: note = Synthetic oligonucleotide
  source 1..16: mol_type = other DNA
gtactctgtgcagtgg

SEQ ID NO: 475 - DNA, 16 bp, synthetic construct
  misc_feature 1..16: note = Synthetic oligonucleotide
  source 1..16: mol_type = other DNA
gagtagaacagagtcc

SEQ ID NO: 476 - DNA, 16 bp, synthetic construct
  misc_feature 1..16: note = Synthetic oligonucleotide
  source 1..16: mol_type = other DNA
ttaataatcagccttc

SEQ ID NO: 477 - DNA, 16 bp, synthetic construct
  misc_feature 1..16: note = Synthetic oligonucleotide
  source 1..16: mol_type = other DNA
tacaaatgcaggcaga

SEQ ID NO: 478 - DNA, 16 bp, synthetic construct
  misc_feature 1..16: note = Synthetic oligonucleotide
  source 1..16: mol_type = other DNA
ctcgacaacaggtttt

SEQ ID NO: 479 - DNA, 16 bp, synthetic construct
  misc_feature 1..16: note = Synthetic oligonucleotide
  source 1..16: mol_type = other DNA
aggaacatgatgacat

SEQ ID NO: 480 - DNA, 16 bp, synthetic construct
  misc_feature 1..16: note = Synthetic oligonucleotide
  source 1..16: mol_type = other DNA
ctgcaggcggcgggca

SEQ ID NO: 481 - DNA, 16 bp, synthetic construct
  misc_feature 1..16: note = Synthetic oligonucleotide
  source 1..16: mol_type = other DNA
atcttggtgaggtatc

SEQ ID NO: 482 - DNA, 16 bp, synthetic construct
  misc_feature 1..16: note = Synthetic oligonucleotide
  source 1..16: mol_type = other DNA
atggaagacatgcagg

SEQ ID NO: 483 - DNA, 16 bp, synthetic construct
  misc_feature 1..16: note = Synthetic oligonucleotide
  source 1..16: mol_type = other DNA
taaaatgactcaggct

SEQ ID NO: 484 - DNA, 16 bp, synthetic construct
  misc_feature 1..16: note = Synthetic oligonucleotide
  source 1..16: mol_type = other DNA
catcaagttagaggcc

SEQ ID NO: 485 - DNA, 16 bp, synthetic construct
  misc_feature 1..16: note = Synthetic oligonucleotide
  source 1..16: mol_type = other DNA
tatacgggtaccttct

SEQ ID NO: 486 - DNA, 16 bp, synthetic construct
  misc_feature 1..16: note = Synthetic oligonucleotide
  source 1..16: mol_type = other DNA
gctcagtgcaaactgc

SEQ ID NO: 487 - DNA, 16 bp, synthetic construct
  misc_feature 1..16: note = Synthetic oligonucleotide
  source 1..16: mol_type = other DNA
ctcgatgtagtcgaca

SEQ ID NO: 488 - DNA, 16 bp, synthetic construct
  misc_feature 1..16: note = Synthetic oligonucleotide
  source 1..16: mol_type = other DNA
cccgagaagtggaaac

SEQ ID NO: 489 - DNA, 16 bp, synthetic construct
  misc_feature 1..16: note = Synthetic oligonucleotide
  source 1..16: mol_type = other DNA
ccaagatcccacgaga

SEQ ID NO: 490 - DNA, 16 bp, synthetic construct
  misc_feature 1..16: note = Synthetic oligonucleotide
  source 1..16: mol_type = other DNA
gagaaagtggtcctgc

SEQ ID NO: 491 - DNA, 16 bp, synthetic construct
  misc_feature 1..16: note = Synthetic oligonucleotide
  source 1..16: mol_type = other DNA
cagcaataactgattt

SEQ ID NO: 492 - DNA, 16 bp, synthetic construct
  misc_feature 1..16: note = Synthetic oligonucleotide
  source 1..16: mol_type = other DNA
cgcctgagaagctcag

SEQ ID NO: 493 - DNA, 16 bp, synthetic construct
  misc_feature 1..16: note = Synthetic oligonucleotide
  source 1..16: mol_type = other DNA
ccacacaacgcacatc

SEQ ID NO: 494 - DNA, 16 bp, synthetic construct
  misc_feature 1..16: note = Synthetic oligonucleotide
  source 1..16: mol_type = other DNA
gaccaaacagtgctcg

SEQ ID NO: 495 - DNA, 16 bp, synthetic construct
  misc_feature 1..16: note = Synthetic oligonucleotide
  source 1..16: mol_type = other DNA
ctacaaagaccttttc

SEQ ID NO: 496 - DNA, 16 bp, synthetic construct
  misc_feature 1..16: note = Synthetic oligonucleotide
  source 1..16: mol_type = other DNA
taggagaaagtaggga

SEQ ID NO: 497 - DNA, 16 bp, synthetic construct
  misc_feature 1..16: note = Synthetic oligonucleotide
  source 1..16: mol_type = other DNA
gaatatcaatatctaa

SEQ ID NO: 498 - DNA, 16 bp, synthetic construct
  misc_feature 1..16: note = Synthetic oligonucleotide
  source 1..16: mol_type = other DNA
tcccggtggtcactct

SEQ ID NO: 499 - DNA, 16 bp, synthetic construct
  misc_feature 1..16: note = Synthetic oligonucleotide
  source 1..16: mol_type = other DNA
gggtcccgtcctcctc

SEQ ID NO: 500 - DNA, 16 bp, synthetic construct
  misc_feature 1..16: note = Synthetic oligonucleotide
  source 1..16: mol_type = other DNA
ccacatgagaaagacc

SEQ ID NO: 501 - DNA, 16 bp, synthetic construct
  misc_feature 1..16: note = Synthetic oligonucleotide
  source 1..16: mol_type = other DNA
catgactgtcacactt

SEQ ID NO: 502 - DNA, 16 bp, synthetic construct
  misc_feature 1..16: note = Synthetic oligonucleotide
  source 1..16: mol_type = other DNA
tggccacgccggcatc

SEQ ID NO: 503 - DNA, 16 bp, synthetic construct
  misc_feature 1..16: note = Synthetic oligonucleotide
  source 1..16: mol_type = other DNA
tggcagttgagcacgc

SEQ ID NO: 504 - DNA, 16 bp, synthetic construct
  misc_feature 1..16: note = Synthetic oligonucleotide
  source 1..16: mol_type = other DNA
gtctagaaaaagtcct

SEQ ID NO: 505 - DNA, 16 bp, synthetic construct
  misc_feature 1..16: note = Synthetic oligonucleotide
  source 1..16: mol_type = other DNA
ccgtgccaggtcatgc

SEQ ID NO: 506 - DNA, 16 bp, synthetic construct
  misc_feature 1..16: note = Synthetic oligonucleotide
  source 1..16: mol_type = other DNA
ctgggatacagacacc

SEQ ID NO: 507 - DNA, 16 bp, synthetic construct
  misc_feature 1..16: note = Synthetic oligonucleotide
  source 1..16: mol_type = other DNA
aattaaaagactccat

SEQ ID NO: 508 - DNA, 16 bp, synthetic construct
  misc_feature 1..16: note = Synthetic oligonucleotide
  source 1..16: mol_type = other DNA
tattagcaattacacc

SEQ ID NO: 509 - DNA, 16 bp, synthetic construct
  misc_feature 1..16: note = Synthetic oligonucleotide
  source 1..16: mol_type = other DNA
ttacaggcacagagtg

SEQ ID NO: 510 - DNA, 16 bp, synthetic construct
  misc_feature 1..16: note = Synthetic oligonucleotide
  source 1..16: mol_type = other DNA
ctgtacccacccgcca

SEQ ID NO: 511 - DNA, 16 bp, synthetic construct
  misc_feature 1..16: note = Synthetic oligonucleotide
  source 1..16: mol_type = other DNA
aacaagattccttccc

SEQ ID NO: 512 - DNA, 16 bp, synthetic construct
  misc_feature 1..16: note = Synthetic oligonucleotide
  source 1..16: mol_type = other DNA
ggcagaactctggcac

SEQ ID NO: 513 - DNA, 16 bp, synthetic construct
  misc_feature 1..16: note = Synthetic oligonucleotide
  source 1..16: mol_type = other DNA
cccaaagtccccaggg

SEQ ID NO: 514 - DNA, 16 bp, synthetic construct
  misc_feature 1..16: note = Synthetic oligonucleotide
  source 1..16: mol_type = other DNA
ggtgaaagatggtgat

SEQ ID NO: 515 - DNA, 16 bp, synthetic construct
  misc_feature 1..16: note = Synthetic oligonucleotide
  source 1..16: mol_type = other DNA
catcatggctgcaatg

SEQ ID NO: 516 - DNA, 16 bp, synthetic construct
  misc_feature 1..16: note = Synthetic oligonucleotide
  source 1..16: mol_type = other DNA
gggaaccaggcctcat

SEQ ID NO: 517 - DNA, 16 bp, synthetic construct
  misc_feature 1..16: note = Synthetic oligonucleotide
  source 1..16: mol_type = other DNA
tgctgaccatacagtc

SEQ ID NO: 518 - DNA, 16 bp, synthetic construct
  misc_feature 1..16: note = Synthetic oligonucleotide
  source 1..16: mol_type = other DNA
gtgcactatcctgtag

SEQ ID NO: 519 - DNA, 16 bp, synthetic construct
  misc_feature 1..16: note = Synthetic oligonucleotide
  source 1..16: mol_type = other DNA
caaagacggaaatggg

SEQ ID NO: 520 - DNA, 16 bp, synthetic construct
  misc_feature 1..16: note = Synthetic oligonucleotide
  source 1..16: mol_type = other DNA
gcacctggcaatggcg

SEQ ID NO: 521 - DNA, 16 bp, synthetic construct
  misc_feature 1..16: note = Synthetic oligonucleotide
  source 1..16: mol_type = other DNA
cgggtccccatgctgg

SEQ ID NO: 522 - DNA, 16 bp, synthetic construct
  misc_feature 1..16: note = Synthetic oligonucleotide
  source 1..16: mol_type = other DNA
tgcttagcactcatca

SEQ ID NO: 523 - DNA, 16 bp, synthetic construct
  misc_feature 1..16: note = Synthetic oligonucleotide
  source 1..16: mol_type = other DNA
cctacatgccagcctg

SEQ ID NO: 524 - DNA, 16 bp, synthetic construct
  misc_feature 1..16: note = Synthetic oligonucleotide
  source 1..16: mol_type = other DNA
aaagagatgctggcct

SEQ ID NO: 525 - DNA, 16 bp, synthetic construct
  misc_feature 1..16: note = Synthetic oligonucleotide
  source 1..16: mol_type = other DNA
gcacaggcggcttgtg

SEQ ID NO: 526 - DNA, 16 bp, synthetic construct
  misc_feature 1..16: note = Synthetic oligonucleotide
  source 1..16: mol_type = other DNA
ccatatttatgcacat

SEQ ID NO: 527 - DNA, 16 bp, synthetic construct
  misc_feature 1..16: note = Synthetic oligonucleotide
  source 1..16: mol_type = other DNA
tttcagtactctatat

SEQ ID NO: 528 - DNA, 16 bp, synthetic construct
  misc_feature 1..16: note = Synthetic oligonucleotide
  source 1..16: mol_type = other DNA
aacggctgtcacggcc

SEQ ID NO: 529 - DNA, 16 bp, synthetic construct
  misc_feature 1..16: note = Synthetic oligonucleotide
  source 1..16: mol_type = other DNA
agagagggacaagtcg

SEQ ID NO: 530 - DNA, 16 bp, synthetic construct
  misc_feature 1..16: note = Synthetic oligonucleotide
  source 1..16: mol_type = other DNA
ttccaggcaaggaggc

SEQ ID NO: 531 - DNA, 16 bp, synthetic construct
  misc_feature 1..16: note = Synthetic oligonucleotide
  source 1..16: mol_type = other DNA
ggcagcacccgagcac

SEQ ID NO: 532 - DNA, 16 bp, synthetic construct
  misc_feature 1..16: note = Synthetic oligonucleotide
  source 1..16: mol_type = other DNA
ataaaagtcattctgc

SEQ ID NO: 533 - DNA, 16 bp, synthetic construct
  misc_feature 1..16: note = Synthetic oligonucleotide
  source 1..16: mol_type = other DNA
attgaatgcctggcac

SEQ ID NO: 534 - DNA, 16 bp, synthetic construct
  misc_feature 1..16: note = Synthetic oligonucleotide
  source 1..16: mol_type = other DNA
ccacagttagctggag

SEQ ID NO: 535 - DNA, 16 bp, synthetic construct
  misc_feature 1..16: note = Synthetic oligonucleotide
  source 1..16: mol_type = other DNA
gctcaggaaaccaagg

SEQ ID NO: 536 - DNA, 16 bp, synthetic construct
  misc_feature 1..16: note = Synthetic oligonucleotide
  source 1..16: mol_type = other DNA
ctgccgagtcagtcct

SEQ ID NO: 537 - DNA, 16 bp, synthetic construct
  misc_feature 1..16: note = Synthetic oligonucleotide
  source 1..16: mol_type = other DNA
tgccgggtagtggagc

SEQ ID NO: 538 - DNA, 16 bp, synthetic construct
  misc_feature 1..16: note = Synthetic oligonucleotide
  source 1..16: mol_type = other DNA
cccctctggttccagg

SEQ ID NO: 539 - DNA, 16 bp, synthetic construct
  misc_feature 1..16: note = Synthetic oligonucleotide
  source 1..16: mol_type = other DNA
gctcagttcctgctgt

SEQ ID NO: 540 - DNA, 16 bp, synthetic construct
  misc_feature 1..16: note = Synthetic oligonucleotide
  source 1..16: mol_type = other DNA
agccgggtgaagtaag

SEQ ID NO: 541 - DNA, 16 bp, synthetic construct
  misc_feature 1..16: note = Synthetic oligonucleotide
  source 1..16: mol_type = other DNA
cactcaccgagcttcc

SEQ ID NO: 542 - DNA, 16 bp, synthetic construct
  misc_feature 1..16: note = Synthetic oligonucleotide
  source 1..16: mol_type = other DNA
ccttagaagcatctcc

SEQ ID NO: 543 - DNA, 16 bp, synthetic construct
  misc_feature 1..16: note = Synthetic oligonucleotide
  source 1..16: mol_type = other DNA
gtaaaaaggcaacaga

SEQ ID NO: 544 - DNA, 16 bp, synthetic construct
  misc_feature 1..16: note = Synthetic oligonucleotide
  source 1..16: mol_type = other DNA
cgccaccagagcccca

SEQ ID NO: 545 - DNA, 16 bp, synthetic construct
  misc_feature 1..16: note = Synthetic oligonucleotide
  source 1..16: mol_type = other DNA
cggaatcctggctggg

SEQ ID NO: 546 - DNA, 16 bp, synthetic construct
  misc_feature 1..16: note = Synthetic oligonucleotide
  source 1..16: mol_type = other DNA
tagcaccagctcctcg

SEQ ID NO: 547 - DNA, 16 bp, synthetic construct
  misc_feature 1..16: note = Synthetic oligonucleotide
  source 1..16: mol_type = other DNA
tgctcgggtgcttcgg

SEQ ID NO: 548 - DNA, 16 bp, synthetic construct
  misc_feature 1..16: note = Synthetic oligonucleotide
  source 1..16: mol_type = other DNA
ggctgcgggttcgccc

SEQ ID NO: 549 - DNA, 16 bp, synthetic construct
  misc_feature 1..16: note = Synthetic oligonucleotide
  source 1..16: mol_type = other DNA
cgagaatacctccgcc

SEQ ID NO: 550 - DNA, 16 bp, synthetic construct
  misc_feature 1..16: note = Synthetic oligonucleotide
  source 1..16: mol_type = other DNA
gctgagtaaggacttg

SEQ ID NO: 551 - DNA, 16 bp, synthetic construct
  misc_feature 1..16: note = Synthetic oligonucleotide
  source 1..16: mol_type = other DNA
ttccgctaaataaaaa

SEQ ID NO: 552 - DNA, 16 bp, synthetic construct
  misc_feature 1..16: note = Synthetic oligonucleotide
  source 1..16: mol_type = other DNA
tcagagtagaacagag

SEQ ID NO: 553 - DNA, 16 bp, synthetic construct
  misc_feature 1..16: note = Synthetic oligonucleotide
  source 1..16: mol_type = other DNA
gagggaggtgccaagc

SEQ ID NO: 554 - DNA, 16 bp, synthetic construct
  misc_feature 1..16: note = Synthetic oligonucleotide
  source 1..16: mol_type = other DNA
ctacaaatgcaggcag

SEQ ID NO: 555 - DNA, 16 bp, synthetic construct
  misc_feature 1..16: note = Synthetic oligonucleotide
  source 1..16: mol_type = other DNA
aactacgggccacact

SEQ ID NO: 556 - DNA, 16 bp, synthetic construct
  misc_feature 1..16: note = Synthetic oligonucleotide
  source 1..16: mol_type = other DNA
acggatcctggcccca

SEQ ID NO: 557 - DNA, 16 bp, synthetic construct
  misc_feature 1..16: note = Synthetic oligonucleotide
  source 1..16: mol_type = other DNA
cccggcgggcagcctg

SEQ ID NO: 558 - DNA, 16 bp, synthetic construct
  misc_feature 1..16: note = Synthetic oligonucleotide
  source 1..16: mol_type = other DNA
gatcttggtgaggtat

SEQ ID NO: 559 - DNA, 16 bp, synthetic construct
  misc_feature 1..16: note = Synthetic oligonucleotide
  source 1..16: mol_type = other DNA
ggccatggaagacatg

SEQ ID NO: 560 - DNA, 16 bp, synthetic construct
  misc_feature 1..16: note = Synthetic oligonucleotide
  source 1..16: mol_type = other DNA
ctagagtcatgctttt

SEQ ID NO: 561 - DNA, 16 bp, synthetic construct
  misc_feature 1..16: note = Synthetic oligonucleotide
  source 1..16: mol_type = other DNA
gtggagaatcagtgtg

SEQ ID NO: 562 - DNA, 16 bp, synthetic construct
  misc_feature 1..16: note = Synthetic oligonucleotide
  source 1..16: mol_type = other DNA
ttgaagtccagctctc

SEQ ID NO: 563 - DNA, 16 bp, synthetic construct
  misc_feature 1..16: note = Synthetic oligonucleotide
  source 1..16: mol_type = other DNA
gcaattcggtttgtcc

SEQ ID NO: 564 - DNA, 16 bp, synthetic construct
  misc_feature 1..16: note = Synthetic oligonucleotide
  source 1..16: mol_type = other DNA
agacagaggagtcctc

SEQ ID NO: 565 - DNA, 16 bp, synthetic construct
  misc_feature 1..16: note = Synthetic oligonucleotide
  source 1..16: mol_type = other DNA
gatcatttaaggcaag

SEQ ID NO: 566 - DNA, 16 bp, synthetic construct
  misc_feature 1..16: note = Synthetic oligonucleotide
  source 1..16: mol_type = other DNA
tcccaagatcccacga

SEQ ID NO: 567 - DNA, 16 bp, synthetic construct
  misc_feature 1..16: note = Synthetic oligonucleotide
  source 1..16: mol_type = other DNA
caagagaagcttctcc

SEQ ID NO: 568 - DNA, 16 bp, synthetic construct
  misc_feature 1..16: note = Synthetic oligonucleotide
  source 1..16: mol_type = other DNA
ctacagcaataactga

SEQ ID NO: 569 - DNA, 16 bp, synthetic construct
  misc_feature 1..16: note = Synthetic oligonucleotide
  source 1..16: mol_type = other DNA
gagcagggagctcatt

SEQ ID NO: 570 - DNA, 16 bp, synthetic construct
  misc_feature 1..16: note = Synthetic oligonucleotide
  source 1..16: mol_type = other DNA
ctagaagacagcacag

SEQ ID NO: 571 - DNA, 16 bp, synthetic construct
  misc_feature 1..16: note = Synthetic oligonucleotide
  source 1..16: mol_type = other DNA
ccgacctgaagacatc

SEQ ID NO: 572 - DNA, 16 bp, synthetic construct
  misc_feature 1..16: note = Synthetic oligonucleotide
  source 1..16: mol_type = other DNA
gcccaccgcataatcc

SEQ ID NO: 573 - DNA, 16 bp, synthetic construct
  misc_feature 1..16: note = Synthetic oligonucleotide
  source 1..16: mol_type = other DNA
gacaaaggttagggta

SEQ ID NO: 574 - DNA, 16 bp, synthetic construct
  misc_feature 1..16: note = Synthetic oligonucleotide
  source 1..16: mol_type = other DNA
tgaatatcaatatcta

SEQ ID NO: 575 - DNA, 16 bp, synthetic construct
  misc_feature 1..16: note = Synthetic oligonucleotide
  source 1..16: mol_type = other DNA
cctcgatttcccggtg

SEQ ID NO: 576 - DNA, 16 bp, synthetic construct
  misc_feature 1..16: note = Synthetic oligonucleotide
  source 1..16: mol_type = other DNA
gcgggtcccgtcctcc

SEQ ID NO: 577 - DNA, 16 bp, synthetic construct
  misc_feature 1..16: note = Synthetic oligonucleotide
  source 1..16: mol_type = other DNA
gaccacatgagaaaga

SEQ ID NO: 578 - DNA, 16 bp, synthetic construct
  misc_feature 1..16: note = Synthetic oligonucleotide
  source 1..16: mol_type = other DNA
tgccatgactgtcaca

SEQ ID NO: 579 - DNA, 16 bp, synthetic construct
  misc_feature 1..16: note = Synthetic oligonucleotide
  source 1..16: mol_type = other DNA
cttggccacgccggca

SEQ ID NO: 580 - DNA, 16 bp, synthetic construct
  misc_feature 1..16: note = Synthetic oligonucleotide
  source 1..16: mol_type = other DNA
gctaaccgtgcccttc

SEQ ID NO: 581 - DNA, 16 bp, synthetic construct
  misc_feature 1..16: note = Synthetic oligonucleotide
  source 1..16: mol_type = other DNA
cagtaagggagagaac

SEQ ID NO: 582 - DNA, 16 bp, synthetic construct
  misc_feature 1..16: note = Synthetic oligonucleotide
  source 1..16: mol_type = other DNA
cccgtgccaggtcatg

SEQ ID NO: 583 - DNA, 16 bp, synthetic construct
  misc_feature 1..16: note = Synthetic oligonucleotide
  source 1..16: mol_type = other DNA
agctgctagttattta

SEQ ID NO: 584 - DNA, 16 bp, synthetic construct
  misc_feature 1..16: note = Synthetic oligonucleotide
  source 1..16: mol_type = other DNA
gaaacagggacagttg

SEQ ID NO: 585 - DNA, 16 bp, synthetic construct
  misc_feature 1..16: note = Synthetic oligonucleotide
  source 1..16: mol_type = other DNA
ggaagatattagcaat

SEQ ID NO: 586 - DNA, 16 bp, synthetic construct
  misc_feature 1..16: note = Synthetic oligonucleotide
  source 1..16: mol_type = other DNA
cttacaggcacagagt

SEQ ID NO: 587 - DNA, 16 bp, synthetic construct
  misc_feature 1..16: note = Synthetic oligonucleotide
  source 1..16: mol_type = other DNA
gaggacgcggctgtac

SEQ ID NO: 588 - DNA, 16 bp, synthetic construct
  misc_feature 1..16: note = Synthetic oligonucleotide
  source 1..16: mol_type = other DNA
gtggaacaagattcct

SEQ ID NO: 589 - DNA, 16 bp, synthetic construct
  misc_feature 1..16: note = Synthetic oligonucleotide
  source 1..16: mol_type = other DNA
aggcagaactctggca

SEQ ID NO: 590 - DNA, 16 bp, synthetic construct
  misc_feature 1..16: note = Synthetic oligonucleotide
  source 1..16: mol_type = other DNA
ccaaagttggtcccca

SEQ ID NO: 591 - DNA, 16 bp, synthetic construct
  misc_feature 1..16: note = Synthetic oligonucleotide
  source 1..16: mol_type = other DNA
agcatcatggctgcaa

SEQ ID NO: 592 - DNA, 16 bp, synthetic construct
  misc_feature 1..16: note = Synthetic oligonucleotide
  source 1..16: mol_type = other DNA
cctcagggaaccaggc

SEQ ID NO: 593 - DNA, 16 bp, synthetic construct
  misc_feature 1..16: note = Synthetic oligonucleotide
  source 1..16: mol_type = other DNA
tgccatcctgcttacc

SEQ ID NO: 594 - DNA, 16 bp, synthetic construct
  misc_feature 1..16: note = Synthetic oligonucleotide
  source 1..16: mol_type = other DNA
tgtgctgaccatacag

SEQ ID NO: 595 - DNA, 16 bp, synthetic construct
  misc_feature 1..16: note = Synthetic oligonucleotide
  source 1..16: mol_type = other DNA
caccaaaatgctgcaa

SEQ ID NO: 596 - DNA, 16 bp, synthetic construct
  misc_feature 1..16: note = Synthetic oligonucleotide
  source 1..16: mol_type = other DNA
ggccttagagtcaaag

SEQ ID NO: 597 - DNA, 16 bp, synthetic construct
  misc_feature 1..16: note = Synthetic oligonucleotide
  source 1..16: mol_type = other DNA
agcacctggcaatggc

SEQ ID NO: 598 - DNA, 16 bp, synthetic construct
  misc_feature 1..16: note = Synthetic oligonucleotide
  source 1..16: mol_type = other DNA
gacacgggtccccatg

SEQ ID NO: 599 - DNA, 16 bp, synthetic construct
  misc_feature 1..16: note = Synthetic oligonucleotide
  source 1..16: mol_type = other DNA
actaagctaagtgctt

SEQ ID NO: 600 - DNA, 16 bp, synthetic construct
  misc_feature 1..16: note = Synthetic oligonucleotide
  source 1..16: mol_type = other DNA
gcaaaatggtgctctt

SEQ ID NO: 601 - DNA, 16 bp, synthetic construct
  misc_feature 1..16: note = Synthetic oligonucleotide
  source 1..16: mol_type = other DNA
acctagaaacaactca

SEQ ID NO: 602 - DNA, 16 bp, synthetic construct
  misc_feature 1..16: note = Synthetic oligonucleotide
  source 1..16: mol_type = other DNA
cagcacaggcggcttg

SEQ ID NO: 603 - DNA, 16 bp, synthetic construct
  misc_feature 1..16: note = Synthetic oligonucleotide
  source 1..16: mol_type = other DNA
atgcatattgcatttc

SEQ ID NO: 604 - DNA, 16 bp, synthetic construct
  misc_feature 1..16: note = Synthetic oligonucleotide
  source 1..16: mol_type = other DNA
ggccagaccacactcc

SEQ ID NO: 605 - DNA, 16 bp, synthetic construct
  misc_feature 1..16: note = Synthetic oligonucleotide
  source 1..16: mol_type = other DNA
ggcaacggctgtcacg

SEQ ID NO: 606 - DNA, 16 bp, synthetic construct
  misc_feature 1..16: note = Synthetic oligonucleotide
  source 1..16: mol_type = other DNA
tgagagagggacaagt

SEQ ID NO: 607 - DNA, 16 bp, synthetic construct
  misc_feature 1..16: note = Synthetic oligonucleotide
  source 1..16: mol_type = other DNA
agtgagtgagttccag

SEQ ID NO: 608 - DNA, 16 bp, synthetic construct
  misc_feature 1..16: note = Synthetic oligonucleotide
  source 1..16: mol_type = other DNA
tggcagcacccgagca

SEQ ID NO: 609 - DNA, 16 bp, synthetic construct
  misc_feature 1..16: note = Synthetic oligonucleotide
  source 1..16: mol_type = other DNA
ctcaataaaagtcatt

SEQ ID NO: 610 - DNA, 16 bp, synthetic construct
  misc_feature 1..16: note = Synthetic oligonucleotide
  source 1..16: mol_type = other DNA
gaggattgaatgcctg

SEQ ID NO: 611 - DNA, 16 bp, synthetic construct
  misc_feature 1..16: note = Synthetic oligonucleotide
  source 1..16: mol_type = other DNA
ctccacagttagctgg

SEQ ID NO: 612 - DNA, 16 bp, synthetic construct
  misc_feature 1..16: note = Synthetic oligonucleotide
  source 1..16: mol_type = other DNA
gtaaaggtggctcagg

SEQ ID NO: 613 - DNA, 16 bp, synthetic construct
  misc_feature 1..16: note = Synthetic oligonucleotide
  source 1..16: mol_type = other DNA
actgccgagtcagtcc

SEQ ID NO: 614 - DNA, 16 bp, synthetic construct
  misc_feature 1..16: note = Synthetic oligonucleotide
  source 1..16: mol_type = other DNA
gtgtaccctgccgggt

SEQ ID NO: 615 - DNA, 16 bp, synthetic construct
  misc_feature 1..16: note = Synthetic oligonucleotide
  source 1..16: mol_type = other DNA
ccccctctggttccag

SEQ ID NO: 616 - DNA, 16 bp, synthetic construct
  misc_feature 1..16: note = Synthetic oligonucleotide
  source 1..16: mol_type = other DNA
tggctcagttcctgct

SEQ ID NO: 617 - DNA, 16 bp, synthetic construct
  misc_feature 1..16: note = Synthetic oligonucleotide
  source 1..16: mol_type = other DNA
gcccagccgggtgaag

SEQ ID NO: 618 - DNA, 16 bp, synthetic construct
  misc_feature 1..16: note = Synthetic oligonucleotide
  source 1..16: mol_type = other DNA
atcactcaccgagctt

SEQ ID NO: 619 - DNA, 16 bp, synthetic construct
  misc_feature 1..16: note = Synthetic oligonucleotide
  source 1..16: mol_type = other DNA
tgccttagaagcatct

SEQ ID NO: 620 - DNA, 16 bp, synthetic construct
  misc_feature 1..16: note = Synthetic oligonucleotide
  source 1..16: mol_type = other DNA
ctgtaaaaaggcaaca

SEQ ID NO: 621 - DNA, 16 bp, synthetic construct
  misc_feature 1..16: note = Synthetic oligonucleotide
  source 1..16: mol_type = other DNA
gatcacgccaccagag

SEQ ID NO: 622 - DNA, 16 bp, synthetic construct
  misc_feature 1..16: note = Synthetic oligonucleotide
  source 1..16: mol_type = other DNA
cgcggaatcctggctg

SEQ ID NO: 623 - DNA, 16 bp, synthetic construct
  misc_feature 1..16: note = Synthetic oligonucleotide
  source 1..16: mol_type = other DNA
ctagcaccagctcctc

SEQ ID NO: 624 - DNA, 16 bp, synthetic construct
  misc_feature 1..16: note = Synthetic oligonucleotide
  source 1..16: mol_type = other DNA
ggctgtggttccgtgc

SEQ ID NO: 625 - DNA, 16 bp, synthetic construct
  misc_feature 1..16: note = Synthetic oligonucleotide
  source 1..16: mol_type = other DNA
aaacagcaccgcaccg

SEQ ID NO: 626 - DNA, 16 bp, synthetic construct
  misc_feature 1..16: note = Synthetic oligonucleotide
  source 1..16: mol_type = other DNA
ccgcacacggtcggca

SEQ ID NO: 627 - DNA, 16 bp, synthetic construct
  misc_feature 1..16: note = Synthetic oligonucleotide
  source 1..16: mol_type = other DNA
gaacaaggaagagggc

SEQ ID NO: 628 - DNA, 16 bp, synthetic construct
  misc_feature 1..16: note = Synthetic oligonucleotide
  source 1..16: mol_type = other DNA
caaagacccatctgaa

SEQ ID NO: 629 - DNA, 16 bp, synthetic construct
  misc_feature 1..16: note = Synthetic oligonucleotide
  source 1..16: mol_type = other DNA
tcatgaatcaagtcca

SEQ ID NO: 630 - DNA, 16 bp, synthetic construct
  misc_feature 1..16: note = Synthetic oligonucleotide
  source 1..16: mol_type = other DNA
gcagagatcaatcaca

SEQ ID NO: 631 - DNA, 16 bp, synthetic construct
  misc_feature 1..16: note = Synthetic oligonucleotide
  source 1..16: mol_type = other DNA
tcccatccagatgctc

SEQ ID NO: 632 - DNA, 16 bp, synthetic construct
  misc_feature 1..16: note = Synthetic oligonucleotide
  source 1..16: mol_type = other DNA
attcaggcaaaaatgg

SEQ ID NO: 633 - DNA, 16 bp, synthetic construct
  misc_feature 1..16: note = Synthetic oligonucleotide
  source 1..16: mol_type = other DNA
tccccggcgggcagcc

SEQ ID NO: 634 - DNA, 16 bp, synthetic construct
  misc_feature 1..16: note = Synthetic oligonucleotide
  source 1..16: mol_type = other DNA
ggatcttggtgaggta

SEQ ID NO: 635 - DNA, 16 bp, synthetic construct
  misc_feature 1..16: note = Synthetic oligonucleotide
  source 1..16: mol_type = other DNA
aagaaggccatggaag

SEQ ID NO: 636 - DNA, 16 bp, synthetic construct
  misc_feature 1..16: note = Synthetic oligonucleotide
  source 1..16: mol_type = other DNA
tgccattcccaaaaag

SEQ ID NO: 637 - DNA, 16 bp, synthetic construct
  misc_feature 1..16: note = Synthetic oligonucleotide
  source 1..16: mol_type = other DNA
caaaggaattttggac

SEQ ID NO: 638 - DNA, 16 bp, synthetic construct
  misc_feature 1..16: note = Synthetic oligonucleotide
  source 1..16: mol_type = other DNA
tgccatgtggagaatc

SEQ ID NO: 639 - DNA, 16 bp, synthetic construct
  misc_feature 1..16: note = Synthetic oligonucleotide
  source 1..16: mol_type = other DNA
tcgaacccaggctggt

SEQ ID NO: 640 - DNA, 16 bp, synthetic construct
  misc_feature 1..16: note = Synthetic oligonucleotide
  source 1..16: mol_type = other DNA
catgacataacagcac

SEQ ID NO: 641 - DNA, 16 bp, synthetic construct
  misc_feature 1..16: note = Synthetic oligonucleotide
  source 1..16: mol_type = other DNA
aaagacagaggagtcc

SEQ ID NO: 642 - DNA, 16 bp, synthetic construct
  misc_feature 1..16: note = Synthetic oligonucleotide
  source 1..16: mol_type = other DNA
aaagaggatcatttaa

SEQ ID NO: 643 - DNA, 16 bp, synthetic construct
  misc_feature 1..16: note = Synthetic oligonucleotide
  source 1..16: mol_type = other DNA
caagaacgacaaagct

SEQ ID NO: 644 - DNA, 16 bp, synthetic construct
  misc_feature 1..16: note = Synthetic oligonucleotide
  source 1..16: mol_type = other DNA
ggacacggaagaggca

SEQ ID NO: 645 - DNA, 16 bp, synthetic construct
  misc_feature 1..16: note = Synthetic oligonucleotide
  source 1..16: mol_type = other DNA
acagagaaatgcatgc

SEQ ID NO: 646 - DNA, 16 bp, synthetic construct
  misc_feature 1..16: note = Synthetic oligonucleotide
  source 1..16: mol_type = other DNA
ctctatcttccaaacc

SEQ ID NO: 647 - DNA, 16 bp, synthetic construct
  misc_feature 1..16: note = Synthetic oligonucleotide
  source 1..16: mol_type = other DNA
atacaggcttatctag

SEQ ID NO: 648 - DNA, 16 bp, synthetic construct
  misc_feature 1..16: note = Synthetic oligonucleotide
  source 1..16: mol_type = other DNA
caataggcatctacca

SEQ ID NO: 649 - DNA, 16 bp, synthetic construct
  misc_feature 1..16: note = Synthetic oligonucleotide
  source 1..16: mol_type = other DNA
aggacttacagcccac

SEQ ID NO: 650 - DNA, 16 bp, synthetic construct
  misc_feature 1..16: note = Synthetic oligonucleotide
  source 1..16: mol_type = other DNA
gcccatgcaggacaaa

SEQ ID NO: 651 - DNA, 16 bp, synthetic construct
  misc_feature 1..16: note = Synthetic oligonucleotide
  source 1..16: mol_type = other DNA
tatgaatatcaatatc

SEQ ID NO: 652 - DNA, 16 bp, synthetic construct
  misc_feature 1..16: note = Synthetic oligonucleotide
  source 1..16: mol_type = other DNA
catgaccctgccctcg

SEQ ID NO: 653 - DNA, 16 bp, synthetic construct
  misc_feature 1..16: note = Synthetic oligonucleotide
  source 1..16: mol_type = other DNA
gaagcgggtcccgtcc

SEQ ID NO: 654 - DNA, 16 bp, synthetic construct
  misc_feature 1..16: note = Synthetic oligonucleotide
  source 1..16: mol_type = other DNA
acacaaggaccacatg

SEQ ID NO: 655 - DNA, 16 bp, synthetic construct
  misc_feature 1..16: note = Synthetic oligonucleotide
  source 1..16: mol_type = other DNA
tgccaggtgggtgcca

SEQ ID NO: 656 - DNA, 16 bp, synthetic construct
  misc_feature 1..16: note = Synthetic oligonucleotide
  source 1..16: mol_type = other DNA
ccttggccacgccggc

SEQ ID NO: 657 - DNA, 16 bp, synthetic construct
  misc_feature 1..16: note = Synthetic oligonucleotide
  source 1..16: mol_type = other DNA
ccgctaaccgtgccct

SEQ ID NO: 658 - DNA, 16 bp, synthetic construct
  misc_feature 1..16: note = Synthetic oligonucleotide
  source 1..16: mol_type = other DNA
cttgagctgtgcgacc

SEQ ID NO: 659 - DNA, 16 bp, synthetic construct
  misc_feature 1..16: note = Synthetic oligonucleotide
  source 1..16: mol_type = other DNA
ccccgtgccaggtcat

SEQ ID NO: 660 - DNA, 16 bp, synthetic construct
  misc_feature 1..16: note = Synthetic oligonucleotide
  source 1..16: mol_type = other DNA
acaacagccacattta

SEQ ID NO: 661 - DNA, 16 bp, synthetic construct
  misc_feature 1..16: note = Synthetic oligonucleotide
  source 1..16: mol_type = other DNA
tgtgaaacagggacag

SEQ ID NO: 662 - DNA, 16 bp, synthetic construct
  misc_feature 1..16: note = Synthetic oligonucleotide
  source 1..16: mol_type = other DNA
taatatatacatccta

SEQ ID NO: 663 - DNA, 16 bp, synthetic construct
  misc_feature 1..16: note = Synthetic oligonucleotide
  source 1..16: mol_type = other DNA
ccttacaggcacagag

SEQ ID NO: 664 - DNA, 16 bp, synthetic construct
  misc_feature 1..16: note = Synthetic oligonucleotide
  source 1..16: mol_type = other DNA
gttgaggacgcggctg

SEQ ID NO: 665 - DNA, 16 bp, synthetic construct
  misc_feature 1..16: note = Synthetic oligonucleotide
  source 1..16: mol_type = other DNA
ccaacgcgcgcgcgcg

SEQ ID NO: 666 - DNA, 16 bp, synthetic construct
  misc_feature 1..16: note = Synthetic oligonucleotide
  source 1..16: mol_type = other DNA
gaaaatctgactgccc

SEQ ID NO: 667 - DNA, 16 bp, synthetic construct
  misc_feature 1..16: note = Synthetic oligonucleotide
  source 1..16: mol_type = other DNA
ggccaaagttggtccc

SEQ ID NO: 668 - DNA, 16 bp, synthetic construct
  misc_feature 1..16: note = Synthetic oligonucleotide
  source 1..16: mol_type = other DNA
agacagcatcatggct

SEQ ID NO: 669 - DNA, 16 bp, synthetic construct
  misc_feature 1..16: note = Synthetic oligonucleotide
  source 1..16: mol_type = other DNA
tcagtacccgctggtc

SEQ ID NO: 670 - DNA, 16 bp, synthetic construct
  misc_feature 1..16: note = Synthetic oligonucleotide
  source 1..16: mol_type = other DNA
ggtcacacagacctcc

SEQ ID NO: 671 - DNA, 16 bp, synthetic construct
  misc_feature 1..16: note = Synthetic oligonucleotide
  source 1..16: mol_type = other DNA
cccgagtgtgctgacc

SEQ ID NO: 672 - DNA, 16 bp, synthetic construct
  misc_feature 1..16: note = Synthetic oligonucleotide
  source 1..16: mol_type = other DNA
ttccaccaaaatgctg

SEQ ID NO: 673 - DNA, 16 bp, synthetic construct
  misc_feature 1..16: note = Synthetic oligonucleotide
  source 1..16: mol_type = other DNA
cagcacctggcaatgg

SEQ ID NO: 674 - DNA, 16 bp, synthetic construct
  misc_feature 1..16: note = Synthetic oligonucleotide
  source 1..16: mol_type = other DNA
ggacacgggtccccat

SEQ ID NO: 675 - DNA, 16 bp, synthetic construct
  misc_feature 1..16: note = Synthetic oligonucleotide
  source 1..16: mol_type = other DNA
ggcaagcccagcctcc

SEQ ID NO: 676 - DNA, 16 bp, synthetic construct
  misc_feature 1..16: note = Synthetic oligonucleotide
  source 1..16: mol_type = other DNA
aacgatagctagaatt

SEQ ID NO: 677 - DNA, 16 bp, synthetic construct
  misc_feature 1..16: note = Synthetic oligonucleotide
  source 1..16: mol_type = other DNA
tggtagggttgtggtt

SEQ ID NO: 678 - DNA, 16 bp, synthetic construct
  misc_feature 1..16: note = Synthetic oligonucleotide
  source 1..16: mol_type = other DNA
gcaagagctaggaaac

SEQ ID NO: 679 - DNA, 16 bp, synthetic construct
  misc_feature 1..16: note = Synthetic oligonucleotide
  source 1..16: mol_type = other DNA
ctcagcacaggcggct

SEQ ID NO: 680 - DNA, 16 bp, synthetic construct
  misc_feature 1..16: note = Synthetic oligonucleotide
  source 1..16: mol_type = other DNA
atgcatgcatattgca

SEQ ID NO: 681 - DNA, 16 bp, synthetic construct
  misc_feature 1..16: note = Synthetic oligonucleotide
  source 1..16: mol_type = other DNA
cttcagactccagcct

SEQ ID NO: 682 - DNA, 16 bp, synthetic construct
  misc_feature 1..16: note = Synthetic oligonucleotide
  source 1..16: mol_type = other DNA
gatggcaacggctgtc

SEQ ID NO: 683 - DNA, 16 bp, synthetic construct
  misc_feature 1..16: note = Synthetic oligonucleotide
  source 1..16: mol_type = other DNA
gctgagagagggacaa

SEQ ID NO: 684 - DNA, 16 bp, synthetic construct
  misc_feature 1..16: note = Synthetic oligonucleotide
  source 1..16: mol_type = other DNA
ccagagtgagtgagtt

SEQ ID NO: 685 - DNA, 16 bp, synthetic construct
  misc_feature 1..16: note = Synthetic oligonucleotide
  source 1..16: mol_type = other DNA
ctggcagcacccgagc

SEQ ID NO: 686 - DNA, 16 bp, synthetic construct
  misc_feature 1..16: note = Synthetic oligonucleotide
  source 1..16: mol_type = other DNA
gctcaataaaagtcat

SEQ ID NO: 687 - DNA, 16 bp, synthetic construct
  misc_feature 1..16: note = Synthetic oligonucleotide
  source 1..16: mol_type = other DNA
acctgaggattgaatg

SEQ ID NO: 688 - DNA, 16 bp, synthetic construct
  misc_feature 1..16: note = Synthetic oligonucleotide
  source 1..16: mol_type = other DNA
aatcagggagccccca

SEQ ID NO: 689 - DNA, 16 bp, synthetic construct
  misc_feature 1..16: note = Synthetic oligonucleotide
  source 1..16: mol_type = other DNA
gagtaaaggtggctca

SEQ ID NO: 690 - DNA, 16 bp, synthetic construct
  misc_feature 1..16: note = Synthetic oligonucleotide
  source 1..16: mol_type = other DNA
cactgccgagtcagtc

SEQ ID NO: 691 - DNA, 16 bp, synthetic construct
  misc_feature 1..16: note = Synthetic oligonucleotide
  source 1..16: mol_type = other DNA
gcgaatgtgtaccctg

SEQ ID NO: 692 - DNA, 16 bp, synthetic construct
  misc_feature 1..16: note = Synthetic oligonucleotide
  source 1..16: mol_type = other DNA
cgccccctctggttcc

SEQ ID NO: 693 - DNA, 16 bp, synthetic construct
  misc_feature 1..16: note = Synthetic oligonucleotide
  source 1..16: mol_type = other DNA
ctggctcagttcctgc

SEQ ID NO: 694 - DNA, 16 bp, synthetic construct
  misc_feature 1..16: note = Synthetic oligonucleotide
  source 1..16: mol_type = other DNA
aaatgaggagcccagc

SEQ ID NO: 695 - DNA, 16 bp, synthetic construct
  misc_feature 1..16: note = Synthetic oligonucleotide
  source 1..16: mol_type = other DNA
tgccatcactcaccga

SEQ ID NO: 696 - DNA, 16 bp, synthetic construct
  misc_feature 1..16: note = Synthetic oligonucleotide
  source 1..16: mol_type = other DNA
ccccgaccatgcctta

SEQ ID NO: 697 - DNA, 16 bp, synthetic construct
  misc_feature 1..16: note = Synthetic oligonucleotide
  source 1..16: mol_type = other DNA
ggctgtaaaaaggcaa

SEQ ID NO: 698 - DNA, 16 bp, synthetic construct
  misc_feature 1..16: note = Synthetic oligonucleotide
  source 1..16: mol_type = other DNA
gcagatcacgccacca

SEQ ID NO: 699 - DNA, 16 bp, synthetic construct
  misc_feature 1..16: note = Synthetic oligonucleotide
  source 1..16: mol_type = other DNA
gcgcgcggaatcctgg

SEQ ID NO: 700 - DNA, 16 bp, synthetic construct
  misc_feature 1..16: note = Synthetic oligonucleotide
  source 1..16: mol_type = other DNA
gctagcaccagctcct

SEQ ID NO: 701 - DNA, 16 bp, synthetic construct
  misc_feature 1..16: note = Synthetic oligonucleotide
  source 1..16: mol_type = other DNA
tggaaggtggctgtgg

SEQ ID NO: 702 - DNA, 16 bp, synthetic construct
  misc_feature 1..16: note = Synthetic oligonucleotide
  source 1..16: mol_type = other DNA
ccgagaggaaacagca

SEQ ID NO: 703 - DNA, 16 bp, synthetic construct
  misc_feature 1..16: note = Synthetic oligonucleotide
  source 1..16: mol_type = other DNA
agcaaactcgccccgc

SEQ ID NO: 704 - DNA, 16 bp, synthetic construct
  misc_feature 1..16: note = Synthetic oligonucleotide
  source 1..16: mol_type = other DNA
ggctcagggaacaagg

SEQ ID NO: 705 - DNA, 16 bp, synthetic construct
  misc_feature 1..16: note = Synthetic oligonucleotide
  source 1..16: mol_type = other DNA
caccatcatcgctgaa

SEQ ID NO: 706 - DNA, 16 bp, synthetic construct
  misc_feature 1..16: note = Synthetic oligonucleotide
  source 1..16: mol_type = other DNA
gcagacatacctgctt

SEQ ID NO: 707 - DNA, 16 bp, synthetic construct
  misc_feature 1..16: note = Synthetic oligonucleotide
  source 1..16: mol_type = other DNA
ctacatgtgcagagat

SEQ ID NO: 708 - DNA, 16 bp, synthetic construct
  misc_feature 1..16: note = Synthetic oligonucleotide
  source 1..16: mol_type = other DNA
ataaatctcccatcca

SEQ ID NO: 709 - DNA, 16 bp, synthetic construct
  misc_feature 1..16: note = Synthetic oligonucleotide
  source 1..16: mol_type = other DNA
tttcaaatgtgccatt

SEQ ID NO: 710 - DNA, 16 bp, synthetic construct
  misc_feature 1..16: note = Synthetic oligonucleotide
  source 1..16: mol_type = other DNA
atccccggcgggcagc

SEQ ID NO: 711 - DNA, 16 bp, synthetic construct
  misc_feature 1..16: note = Synthetic oligonucleotide
  source 1..16: mol_type = other DNA
aggatcttggtgaggt

SEQ ID NO: 712 - DNA, 16 bp, synthetic construct
  misc_feature 1..16: note = Synthetic oligonucleotide
  source 1..16: mol_type = other DNA
cgccactcatcttcac

SEQ ID NO: 713 - DNA, 16 bp, synthetic construct
  misc_feature 1..16: note = Synthetic oligonucleotide
  source 1..16: mol_type = other DNA
ggcctactaagcacag

SEQ ID NO: 714 - DNA, 16 bp, synthetic construct
  misc_feature 1..16: note = Synthetic oligonucleotide
  source 1..16: mol_type = other DNA
ttcaaaggaattttgg

SEQ ID NO: 715 - DNA, 16 bp, synthetic construct
  misc_feature 1..16: note = Synthetic oligonucleotide
  source 1..16: mol_type = other DNA
acccaggtccagactc

SEQ ID NO: 716 - DNA, 16 bp, synthetic construct
  misc_feature 1..16: note = Synthetic oligonucleotide
  source 1..16: mol_type = other DNA
ggttagacagccaata

SEQ ID NO: 717 - DNA, 16 bp, synthetic construct
  misc_feature 1..16: note = Synthetic oligonucleotide
  source 1..16: mol_type = other DNA
ctaaatcatgacataa

SEQ ID NO: 718 - DNA, 16 bp, synthetic construct
  misc_feature 1..16: note = Synthetic oligonucleotide
  source 1..16: mol_type = other DNA
gcaaagacagaggagt

SEQ ID NO: 719 - DNA, 16 bp, synthetic construct
  misc_feature 1..16: note = Synthetic oligonucleotide
  source 1..16: mol_type = other DNA
tccaaggtaagtgcag

SEQ ID NO: 720 - DNA, 16 bp, synthetic construct
  misc_feature 1..16: note = Synthetic oligonucleotide
  source 1..16: mol_type = other DNA
gacaagaacgacaaag

SEQ ID NO: 721 - DNA, 16 bp, synthetic construct
  misc_feature 1..16: note = Synthetic oligonucleotide
  source 1..16: mol_type = other DNA
gacaatgaagaggaga

SEQ ID NO: 722 - DNA, 16 bp, synthetic construct
  misc_feature 1..16: note = Synthetic oligonucleotide
  source 1..16: mol_type = other DNA
ctcaatacctgacaga

SEQ ID NO: 723 - DNA, 16 bp, synthetic construct
  misc_feature 1..16: note = Synthetic oligonucleotide
  source 1..16: mol_type = other DNA
tggtaaaagcccccac

SEQ ID NO: 724 - DNA, 16 bp, synthetic construct
  misc_feature 1..16: note = Synthetic oligonucleotide
  source 1..16: mol_type = other DNA
atacattggcagacag

SEQ ID NO: 725 - DNA, 16 bp, synthetic construct
  misc_feature 1..16: note = Synthetic oligonucleotide
  source 1..16: mol_type = other DNA
actcatcaataggcat

SEQ ID NO: 726 - DNA, 16 bp, synthetic construct
  misc_feature 1..16: note = Synthetic oligonucleotide
  source 1..16: mol_type = other DNA
catcacaggacttaca

SEQ ID NO: 727 - DNA, 16 bp, synthetic construct
  misc_feature 1..16: note = Synthetic oligonucleotide
  source 1..16: mol_type = other DNA
caagagactcactggg

SEQ ID NO: 728 - DNA, 16 bp, synthetic construct
  misc_feature 1..16: note = Synthetic oligonucleotide
  source 1..16: mol_type = other DNA
tgccaagaaggaccca

SEQ ID NO: 729 - DNA, 16 bp, synthetic construct
  misc_feature 1..16: note = Synthetic oligonucleotide
  source 1..16: mol_type = other DNA
gaccatgaccctgccc

SEQ ID NO: 730 - DNA, 16 bp, synthetic construct
  misc_feature 1..16: note = Synthetic oligonucleotide
  source 1..16: mol_type = other DNA
tggaagcgggtcccgt

SEQ ID NO: 731 - DNA, 16 bp, synthetic construct
  misc_feature 1..16: note = Synthetic oligonucleotide
  source 1..16: mol_type = other DNA
tgctcgacgaacacaa

SEQ ID NO: 732 - DNA, 16 bp, synthetic construct
  misc_feature 1..16: note = Synthetic oligonucleotide
  source 1..16: mol_type = other DNA
cgctgaccacccctgc

SEQ ID NO: 733 - DNA, 16 bp, synthetic construct
  misc_feature 1..16: note = Synthetic oligonucleotide
  source 1..16: mol_type = other DNA
cccttggccacgccgg

SEQ ID NO: 734 - DNA, 16 bp, synthetic construct
  misc_feature 1..16: note = Synthetic oligonucleotide
  source 1..16: mol_type = other DNA
tgccgctaaccgtgcc

SEQ ID NO: 735 - DNA, 16 bp, synthetic construct
  misc_feature 1..16: note = Synthetic oligonucleotide
  source 1..16: mol_type = other DNA
gtggaagtcaagctgc

SEQ ID NO: 736 - DNA, 16 bp, synthetic construct
  misc_feature 1..16: note = Synthetic oligonucleotide
  source 1..16: mol_type = other DNA
gccccgtgccaggtca

SEQ ID NO: 737 - DNA, 16 bp, synthetic construct
  misc_feature 1..16: note = Synthetic oligonucleotide
  source 1..16: mol_type = other DNA
taggagacagctagtg

SEQ ID NO: 738 - DNA, 16 bp, synthetic construct
  misc_feature 1..16: note = Synthetic oligonucleotide
  source 1..16: mol_type = other DNA
cacaaacttgaacaga

SEQ ID NO: 739 - DNA, 16 bp, synthetic construct
  misc_feature 1..16: note = Synthetic oligonucleotide
  source 1..16: mol_type = other DNA
cttaatatatacatcc

SEQ ID NO: 740 - DNA, 16 bp, synthetic construct
  misc_feature 1..16: note = Synthetic oligonucleotide
  source 1..16: mol_type = other DNA
gccaaggtcacccctt

SEQ ID NO: 741 - DNA, 16 bp, synthetic construct
  misc_feature 1..16: note = Synthetic oligonucleotide
  source 1..16: mol_type = other DNA
gaccagcacgacccca

SEQ ID NO: 742 - DNA, 16 bp, synthetic construct
  misc_feature 1..16: note = Synthetic oligonucleotide
  source 1..16: mol_type = other DNA
acctaggttaccgctg

SEQ ID NO: 743 - DNA, 16 bp, synthetic construct
  misc_feature 1..16: note = Synthetic oligonucleotide
  source 1..16: mol_type = other DNA
aggaaaatctgactgc

SEQ ID NO: 744 - DNA, 16 bp, synthetic construct
  misc_feature 1..16: note = Synthetic oligonucleotide
  source 1..16: mol_type = other DNA
acacagcggccaaagt

SEQ ID NO: 745 - DNA, 16 bp, synthetic construct
  misc_feature 1..16: note = Synthetic oligonucleotide
  source 1..16: mol_type = other DNA
gcagacagcatcatgg

SEQ ID NO: 746 - DNA, 16 bp, synthetic construct
  misc_feature 1..16: note = Synthetic oligonucleotide
  source 1..16: mol_type = other DNA
ggtcagtacccgctgg

SEQ ID NO: 747 - DNA, 16 bp, synthetic construct
  misc_feature 1..16: note = Synthetic oligonucleotide
  source 1..16: mol_type = other DNA
cctatttaaggtggcg

SEQ ID NO: 748 - DNA, 16 bp, synthetic construct
  misc_feature 1..16: note = Synthetic oligonucleotide
  source 1..16: mol_type = other DNA
cgtgtaggccccgagt

SEQ ID NO: 749 - DNA, 16 bp, synthetic construct
  misc_feature 1..16: note = Synthetic oligonucleotide
  source 1..16: mol_type = other DNA
cagaaatgcctgcccc

SEQ ID NO: 750 - DNA, 16 bp, synthetic construct
  misc_feature 1..16: note = Synthetic oligonucleotide
  source 1..16: mol_type = other DNA
gcagcacctggcaatg

SEQ ID NO: 751 - DNA, 16 bp, synthetic construct
  misc_feature 1..16: note = Synthetic oligonucleotide
  source 1..16: mol_type = other DNA
tggacacgggtcccca

SEQ ID NO: 752 - DNA, 16 bp, synthetic construct
  misc_feature 1..16: note = Synthetic oligonucleotide
  source 1..16: mol_type = other DNA
cctcaccccagggcaa

SEQ ID NO: 753 - DNA, 16 bp, synthetic construct
  misc_feature 1..16: note = Synthetic oligonucleotide
  source 1..16: mol_type = other DNA
gtaacgatagctagaa

SEQ ID NO: 754 - DNA, 16 bp, synthetic construct
  misc_feature 1..16: note = Synthetic oligonucleotide
  source 1..16: mol_type = other DNA
tgaacatggtagggtt

SEQ ID NO: 755 - DNA, 16 bp, synthetic construct
  misc_feature 1..16: note = Synthetic oligonucleotide
  source 1..16: mol_type = other DNA
aggcaagagctaggaa

SEQ ID NO: 756 - DNA, 16 bp, synthetic construct
  misc_feature 1..16: note = Synthetic oligonucleotide
  source 1..16: mol_type = other DNA
acgcactggttgggct

SEQ ID NO: 757 - DNA, 16 bp, synthetic construct
  misc_feature 1..16: note = Synthetic oligonucleotide
  source 1..16: mol_type = other DNA
gttaaatagatcagag

SEQ ID NO: 758 - DNA, 16 bp, synthetic construct
  misc_feature 1..16: note = Synthetic oligonucleotide
  source 1..16: mol_type = other DNA
ccccatagcctgcccc

SEQ ID NO: 759 - DNA, 16 bp, synthetic construct
  misc_feature 1..16: note = Synthetic oligonucleotide
  source 1..16: mol_type = other DNA
gcagatggcaacggct

SEQ ID NO: 760 - DNA, 16 bp, synthetic construct
  misc_feature 1..16: note = Synthetic oligonucleotide
  source 1..16: mol_type = other DNA
ccatggagggctgaga

SEQ ID NO: 761 - DNA, 16 bp, synthetic construct
  misc_feature 1..16: note = Synthetic oligonucleotide
  source 1..16: mol_type = other DNA
acccagagtgagtgag

SEQ ID NO: 762 - DNA, 16 bp, synthetic construct
  misc_feature 1..16: note = Synthetic oligonucleotide
  source 1..16: mol_type = other DNA
gctggcagcacccgag

SEQ ID NO: 763 - DNA, 16 bp, synthetic construct
  misc_feature 1..16: note = Synthetic oligonucleotide
  source 1..16: mol_type = other DNA
agctcaataaaagtca

SEQ ID NO: 764 - DNA, 16 bp, synthetic construct
  misc_feature 1..16: note = Synthetic oligonucleotide
  source 1..16: mol_type = other DNA
gaagaatcctgcctcc

SEQ ID NO: 765 - DNA, 16 bp, synthetic construct
  misc_feature 1..16: note = Synthetic oligonucleotide
  source 1..16: mol_type = other DNA
ttaatcagggagcccc

SEQ ID NO: 766 - DNA, 16 bp, synthetic construct
  misc_feature 1..16: note = Synthetic oligonucleotide
  source 1..16: mol_type = other DNA
gcagagtaaaggtggc

SEQ ID NO: 767 - DNA, 16 bp, synthetic construct
  misc_feature 1..16: note = Synthetic oligonucleotide
  source 1..16: mol_type = other DNA
acactgccgagtcagt

SEQ ID NO: 768 - DNA, 16 bp, synthetic construct
  misc_feature 1..16: note = Synthetic oligonucleotide
  source 1..16: mol_type = other DNA
gtgcgaatgtgtaccc

SEQ ID NO: 769 - DNA, 16 bp, synthetic construct
  misc_feature 1..16: note = Synthetic oligonucleotide
  source 1..16: mol_type = other DNA
ggcaggcacgccccct

SEQ ID NO: 770 - DNA, 16 bp, synthetic construct
  misc_feature 1..16: note = Synthetic oligonucleotide
  source 1..16: mol_type = other DNA
tctggctcagttcctg

SEQ ID NO: 771 - DNA, 16 bp, synthetic construct
  misc_feature 1..16: note = Synthetic oligonucleotide
  source 1..16: mol_type = other DNA
aaaaatgaggagccca

SEQ ID NO: 772 - DNA, 16 bp, synthetic construct
  misc_feature 1..16: note = Synthetic oligonucleotide
  source 1..16: mol_type = other DNA
ttccatgcctgcaggc

SEQ ID NO: 773 - DNA, 16 bp, synthetic construct
  misc_feature 1..16: note = Synthetic oligonucleotide
  source 1..16: mol_type = other DNA
ggacagttgttggccc

SEQ ID NO: 774 - DNA, 16 bp, synthetic construct
  misc_feature 1..16: note = Synthetic oligonucleotide
  source 1..16: mol_type = other DNA
gaaaagttggctgtaa

SEQ ID NO: 775 - DNA, 16 bp, synthetic construct
  misc_feature 1..16: note = Synthetic oligonucleotide
  source 1..16: mol_type = other DNA
accttctagggtgtgg

SEQ ID NO: 776 - DNA, 16 bp, synthetic construct
  misc_feature 1..16: note = Synthetic oligonucleotide
  source 1..16: mol_type = other DNA
ctgaagttcaggagca

SEQ ID NO: 777 - DNA, 16 bp, synthetic construct
  misc_feature 1..16: note = Synthetic oligonucleotide
  source 1..16: mol_type = other DNA
ggctagcaccagctcc

SEQ ID NO: 778 - DNA, 16 bp, synthetic construct
  misc_feature 1..16: note = Synthetic oligonucleotide
  source 1..16: mol_type = other DNA
cgcagcggtggaaggt

SEQ ID NO: 779 - DNA, 16 bp, synthetic construct
  misc_feature 1..16: note = Synthetic oligonucleotide
  source 1..16: mol_type = other DNA
gcgaagagccctcggc

SEQ ID NO: 780 - DNA, 16 bp, synthetic construct
  misc_feature 1..16: note = Synthetic oligonucleotide
  source 1..16: mol_type = other DNA
gggaagaagcttccca

SEQ ID NO: 781 - DNA, 16 bp, synthetic construct
  misc_feature 1..16: note = Synthetic oligonucleotide
  source 1..16: mol_type = other DNA
agaaagtcaaaggctc

SEQ ID NO: 782 - DNA, 16 bp, synthetic construct
  misc_feature 1..16: note = Synthetic oligonucleotide
  source 1..16: mol_type = other DNA
gacaccatcatcgctg

SEQ ID NO: 783 - DNA, 16 bp, synthetic construct
  misc_feature 1..16: note = Synthetic oligonucleotide
  source 1..16: mol_type = other DNA
ggcagacatacctgct

SEQ ID NO: 784 - DNA, 16 bp, synthetic construct
  misc_feature 1..16: note = Synthetic oligonucleotide
  source 1..16: mol_type = other DNA
ggccttaagctgcttt

SEQ ID NO: 785 - DNA, 16 bp, synthetic construct
  misc_feature 1..16: note = Synthetic oligonucleotide
  source 1..16: mol_type = other DNA
atataaatctcccatc

SEQ ID NO: 786 - DNA, 16 bp, synthetic construct
  misc_feature 1..16: note = Synthetic oligonucleotide
  source 1..16: mol_type = other DNA
tcacatggttatataa

SEQ ID NO: 787 - DNA, 16 bp, synthetic construct
  misc_feature 1..16: note = Synthetic oligonucleotide
  source 1..16: mol_type = other DNA
tatccccggcgggcag

SEQ ID NO: 788 - DNA, 16 bp, synthetic construct
  misc_feature 1..16: note = Synthetic oligonucleotide
  source 1..16: mol_type = other DNA
caggatcttggtgagg

SEQ ID NO: 789 - DNA, 16 bp, synthetic construct
  misc_feature 1..16: note = Synthetic oligonucleotide
  source 1..16: mol_type = other DNA
cagcaggtcgccactc

SEQ ID NO: 790 - DNA, 16 bp, synthetic construct
  misc_feature 1..16: note = Synthetic oligonucleotide
  source 1..16: mol_type = other DNA
agcaatgggcctacta

SEQ ID NO: 791 - DNA, 16 bp, synthetic construct
  misc_feature 1..16: note = Synthetic oligonucleotide
  source 1..16: mol_type = other DNA
agcaacagcttcaaag

SEQ ID NO: 792 - DNA, 16 bp, synthetic construct
  misc_feature 1..16: note = Synthetic oligonucleotide
  source 1..16: mol_type = other DNA
ctgattaacccatggg

SEQ ID NO: 793 - DNA, 16 bp, synthetic construct
  misc_feature 1..16: note = Synthetic oligonucleotide
  source 1..16: mol_type = other DNA
ttacagatagaggaat

SEQ ID NO: 794 - DNA, 16 bp, synthetic construct
  misc_feature 1..16: note = Synthetic oligonucleotide
  source 1..16: mol_type = other DNA
ggacatggagtgaagc

SEQ ID NO: 795 - DNA, 16 bp, synthetic construct
  misc_feature 1..16: note = Synthetic oligonucleotide
  source 1..16: mol_type = other DNA
gggcaaagacagagga

SEQ ID NO: 796 - DNA, 16 bp, synthetic construct
  misc_feature 1..16: note = Synthetic oligonucleotide
  source 1..16: mol_type = other DNA
ggtagagtcaccatca

SEQ ID NO: 797 - DNA, 16 bp, synthetic construct
  misc_feature 1..16: note = Synthetic oligonucleotide
  source 1..16: mol_type = other DNA
tctcacagcaacctgt

SEQ ID NO: 798 - DNA, 16 bp, synthetic construct
  misc_feature 1..16: note = Synthetic oligonucleotide
  source 1..16: mol_type = other DNA
tcctaacccccacaac

SEQ ID NO: 799 - DNA, 16 bp, synthetic construct
  misc_feature 1..16: note = Synthetic oligonucleotide
  source 1..16: mol_type = other DNA
tgcagggctaaaatca

SEQ ID NO: 800 - DNA, 16 bp, synthetic construct
  misc_feature 1..16: note = Synthetic oligonucleotide
  source 1..16: mol_type = other DNA
ggcaggtgggcctggt

SEQ ID NO: 801 - DNA, 16 bp, synthetic construct
  misc_feature 1..16: note = Synthetic oligonucleotide
  source 1..16: mol_type = other DNA
ggatacattggcagac

SEQ ID NO: 802 - DNA, 16 bp, synthetic construct
  misc_feature 1..16: note = Synthetic oligonucleotide
  source 1..16: mol_type = other DNA
gtgttaggagctttca

SEQ ID NO: 803 - DNA, 16 bp, synthetic construct
  misc_feature 1..16: note = Synthetic oligonucleotide
  source 1..16: mol_type = other DNA
agacacatcacaggac

SEQ ID NO: 804 - DNA, 16 bp, synthetic construct
  misc_feature 1..16: note = Synthetic oligonucleotide
  source 1..16: mol_type = other DNA
aagaagcaggcactgg

SEQ ID NO: 805 - DNA, 16 bp, synthetic construct
  misc_feature 1..16: note = Synthetic oligonucleotide
  source 1..16: mol_type = other DNA
aaggaaagggaggcct

SEQ ID NO: 806 - DNA, 16 bp, synthetic construct
  misc_feature 1..16: note = Synthetic oligonucleotide
  source 1..16: mol_type = other DNA
tcgaagtcggtgacca

SEQ ID NO: 807 - DNA, 16 bp, synthetic construct
  misc_feature 1..16: note = Synthetic oligonucleotide
  source 1..16: mol_type = other DNA
tgtggaagcgggtccc

SEQ ID NO: 808 - DNA, 16 bp, synthetic construct
  misc_feature 1..16: note = Synthetic oligonucleotide
  source 1..16: mol_type = other DNA
gccgctgaccacccct

SEQ ID NO: 809 - DNA, 16 bp, synthetic construct
  misc_feature 1..16: note = Synthetic oligonucleotide
  source 1..16: mol_type = other DNA
acccttggccacgccg

SEQ ID NO: 810 - DNA, 16 bp, synthetic construct
  misc_feature 1..16: note = Synthetic oligonucleotide
  source 1..16: mol_type = other DNA
tatgagggtgccgcta

SEQ ID NO: 811 - DNA, 16 bp, synthetic construct
  misc_feature 1..16: note = Synthetic oligonucleotide
  source 1..16: mol_type = other DNA
acttacctatgagggt

SEQ ID NO: 812 - DNA, 16 bp, synthetic construct
  misc_feature 1..16: note = Synthetic oligonucleotide
  source 1..16: mol_type = other DNA
ggcttacagtggaagt

SEQ ID NO: 813 - DNA, 16 bp, synthetic construct
  misc_feature 1..16: note = Synthetic oligonucleotide
  source 1..16: mol_type = other DNA
tgccccgtgccaggtc

SEQ ID NO: 814 - DNA, 16 bp, synthetic construct
  misc_feature 1..16: note = Synthetic oligonucleotide
  source 1..16: mol_type = other DNA
ccaggagccgtggcca

SEQ ID NO: 815 - DNA, 16 bp, synthetic construct
  misc_feature 1..16: note = Synthetic oligonucleotide
  source 1..16: mol_type = other DNA
acacaaacttgaacag

SEQ ID NO: 816 - DNA, 16 bp, synthetic construct
  misc_feature 1..16: note = Synthetic oligonucleotide
  source 1..16: mol_type = other DNA
tcttaatatatacatc

SEQ ID NO: 817 - DNA, 16 bp, synthetic construct
  misc_feature 1..16: note = Synthetic oligonucleotide
  source 1..16: mol_type = other DNA
gaacaaagccaaggtc

SEQ ID NO: 818 - DNA, 16 bp, synthetic construct
  misc_feature 1..16: note = Synthetic oligonucleotide
  source 1..16: mol_type = other DNA
ggtgaccagcacgacc

SEQ ID NO: 819 - DNA, 16 bp, synthetic construct
  misc_feature 1..16: note = Synthetic oligonucleotide
  source 1..16: mol_type = other DNA
ccttgataggccaggg

SEQ ID NO: 820 - DNA, 16 bp, synthetic construct
  misc_feature 1..16: note = Synthetic oligonucleotide
  source 1..16: mol_type = other DNA
tcccactcaaatgtcc

SEQ ID NO: 821 - DNA, 16 bp, synthetic construct
  misc_feature 1..16: note = Synthetic oligonucleotide
  source 1..16: mol_type = other DNA
ccacacagcggccaaa

SEQ ID NO: 822 - DNA, 16 bp, synthetic construct
  misc_feature 1..16: note = Synthetic oligonucleotide
  source 1..16: mol_type = other DNA
cggcagacagcatcat

SEQ ID NO: 823 - DNA, 16 bp, synthetic construct
  misc_feature 1..16: note = Synthetic oligonucleotide
  source 1..16: mol_type = other DNA
ggcagggcggccacca

SEQ ID NO: 824 - DNA, 16 bp, synthetic construct
  misc_feature 1..16: note = Synthetic oligonucleotide
  source 1..16: mol_type = other DNA
aaaatattgcacagcc

SEQ ID NO: 825 - DNA, 16 bp, synthetic construct
  misc_feature 1..16: note = Synthetic oligonucleotide
  source 1..16: mol_type = other DNA
ggccatccgtgtaggc

SEQ ID NO: 826 - DNA, 16 bp, synthetic construct
  misc_feature 1..16: note = Synthetic oligonucleotide
  source 1..16: mol_type = other DNA
agcattaagaccccat

SEQ ID NO: 827 - DNA, 16 bp, synthetic construct
  misc_feature 1..16: note = Synthetic oligonucleotide
  source 1..16: mol_type = other DNA
ggcagcacctggcaat

SEQ ID NO: 828 - DNA, 16 bp, synthetic construct
  misc_feature 1..16: note = Synthetic oligonucleotide
  source 1..16: mol_type = other DNA
gtggacacgggtcccc

SEQ ID NO: 829 - DNA, 16 bp, synthetic construct
  misc_feature 1..16: note = Synthetic oligonucleotide
  source 1..16: mol_type = other DNA
agaaagagacccctcc

SEQ ID NO: 830 - DNA, 16 bp, synthetic construct
  misc_feature 1..16: note = Synthetic oligonucleotide
  source 1..16: mol_type = other DNA
aaacaatagtaacgat

SEQ ID NO: 831 - DNA, 16 bp, synthetic construct
  misc_feature 1..16: note = Synthetic oligonucleotide
  source 1..16: mol_type = other DNA
tctgaacatggtaggg

SEQ ID NO: 832 - DNA, 16 bp, synthetic construct
  misc_feature 1..16: note = Synthetic oligonucleotide
  source 1..16: mol_type = other DNA
gcccatccccatcaga

SEQ ID NO: 833 - DNA, 16 bp, synthetic construct
  misc_feature 1..16: note = Synthetic oligonucleotide
  source 1..16: mol_type = other DNA
gggcatggcagcagga

SEQ ID NO: 834 - DNA, 16 bp, synthetic construct
  misc_feature 1..16: note = Synthetic oligonucleotide
  source 1..16: mol_type = other DNA
cttcagcatgcagctc

SEQ ID NO: 835 - DNA, 16 bp, synthetic construct
  misc_feature 1..16: note = Synthetic oligonucleotide
  source 1..16: mol_type = other DNA
tgaaactgatggcccc

SEQ ID NO: 836 - DNA, 16 bp, synthetic construct
  misc_feature 1..16: note = Synthetic oligonucleotide
  source 1..16: mol_type = other DNA
cagcagatggcaacgg

SEQ ID NO: 837 - DNA, 16 bp, synthetic construct
  misc_feature 1..16: note = Synthetic oligonucleotide
  source 1..16: mol_type = other DNA
ggccatggagggctga

SEQ ID NO: 838 - DNA, 16 bp, synthetic construct
  misc_feature 1..16: note = Synthetic oligonucleotide
  source 1..16: mol_type = other DNA
aggcacccagagtgag

SEQ ID NO: 839 - DNA, 16 bp, synthetic construct
  misc_feature 1..16: note = Synthetic oligonucleotide
  source 1..16: mol_type = other DNA
agctggcagcacccga

SEQ ID NO: 840 - DNA, 16 bp, synthetic construct
  misc_feature 1..16: note = Synthetic oligonucleotide
  source 1..16: mol_type = other DNA
gaacaagagctcaata

SEQ ID NO: 841 - DNA, 16 bp, synthetic construct
  misc_feature 1..16: note = Synthetic oligonucleotide
  source 1..16: mol_type = other DNA
gggaagaatcctgcct

SEQ ID NO: 842 - DNA, 16 bp, synthetic construct
  misc_feature 1..16: note = Synthetic oligonucleotide
  source 1..16: mol_type = other DNA
cattaatcagggagcc

SEQ ID NO: 843 - DNA, 16 bp, synthetic construct
  misc_feature 1..16: note = Synthetic oligonucleotide
  source 1..16: mol_type = other DNA
gagcagagtaaaggtg

SEQ ID NO: 844 - DNA, 16 bp, synthetic construct
  misc_feature 1..16: note = Synthetic oligonucleotide
  source 1..16: mol_type = other DNA
cacactgccgagtcag

SEQ ID NO: 845 - DNA, 16 bp, synthetic construct
  misc_feature 1..16: note = Synthetic oligonucleotide
  source 1..16: mol_type = other DNA
aggtttcttcctctgt

SEQ ID NO: 846 - DNA, 16 bp, synthetic construct
  misc_feature 1..16: note = Synthetic oligonucleotide
  source 1..16: mol_type = other DNA
gagcttggcaggcacg

SEQ ID NO: 847 - DNA, 16 bp, synthetic construct
  misc_feature 1..16: note = Synthetic oligonucleotide
  source 1..16: mol_type = other DNA
ttctggctcagttcct

SEQ ID NO: 848 - DNA, 16 bp, synthetic construct
  misc_feature 1..16: note = Synthetic oligonucleotide
  source 1..16: mol_type = other DNA
gtaaaaatgaggagcc

SEQ ID NO: 849 - DNA, 16 bp, synthetic construct
  misc_feature 1..16: note = Synthetic oligonucleotide
  source 1..16: mol_type = other DNA
aaaaagttccatgcct

SEQ ID NO: 850 - DNA, 16 bp, synthetic construct
  misc_feature 1..16: note = Synthetic oligonucleotide
  source 1..16: mol_type = other DNA
ggagggacagttgttg

SEQ ID NO: 851 - DNA, 16 bp, synthetic construct
  misc_feature 1..16: note = Synthetic oligonucleotide
  source 1..16: mol_type = other DNA
tagaaaagttggctgt

SEQ ID NO: 852 - DNA, 16 bp, synthetic construct
  misc_feature 1..16: note = Synthetic oligonucleotide
  source 1..16: mol_type = other DNA
ttgctggcctgtctgt

SEQ ID NO: 853 - DNA, 16 bp, synthetic construct
  misc_feature 1..16: note = Synthetic oligonucleotide
  source 1..16: mol_type = other DNA
gcctatgagggtgccg

SEQ ID NO: 854 - DNA, 16 bp, synthetic construct
  misc_feature 1..16: note = Synthetic oligonucleotide
  source 1..16: mol_type = other DNA
tgccaacctgccccat

SEQ ID NO: 855 - DNA, 16 bp, synthetic construct
  misc_feature 1..16: note = Synthetic oligonucleotide
  source 1..16: mol_type = other DNA
cggaaaccttctaggg

SEQ ID NO: 856 - DNA, 16 bp, synthetic construct
  misc_feature 1..16: note = Synthetic oligonucleotide
  source 1..16: mol_type = other DNA
agctgaagttcaggag

SEQ ID NO: 857 - DNA, 16 bp, synthetic construct
  misc_feature 1..16: note = Synthetic oligonucleotide
  source 1..16: mol_type = other DNA
aggctagcaccagctc

SEQ ID NO: 858 - DNA, 16 bp, synthetic construct
  misc_feature 1..16: note = Synthetic oligonucleotide
  source 1..16: mol_type = other DNA
tggcgcagcggtggaa

SEQ ID NO: 859 - DNA, 16 bp, synthetic construct
  misc_feature 1..16: note = Synthetic oligonucleotide
  source 1..16: mol_type = other DNA
ccactacccgtcctcc

SEQ ID NO: 860 - DNA, 16 bp, synthetic construct
  misc_feature 1..16: note = Synthetic oligonucleotide
  source 1..16: mol_type = other DNA
cgggaagaagcttccc

SEQ ID NO: 861 - DNA, 16 bp, synthetic construct
  misc_feature 1..16: note = Synthetic oligonucleotide
  source 1..16: mol_type = other DNA
ccccacaacatccctc

SEQ ID NO: 862 - DNA, 16 bp, synthetic construct
  misc_feature 1..16: note = Synthetic oligonucleotide
  source 1..16: mol_type = other DNA
aaagaactgtggacat

SEQ ID NO: 863 - DNA, 16 bp, synthetic construct
  misc_feature 1..16: note = Synthetic oligonucleotide
  source 1..16: mol_type = other DNA
aggcagacatacctgc

SEQ ID NO: 864 - DNA, 16 bp, synthetic construct
  misc_feature 1..16: note = Synthetic oligonucleotide
  source 1..16: mol_type = other DNA
ctgcaagctctccagg

SEQ ID NO: 865 - DNA, 16 bp, synthetic construct
  misc_feature 1..16: note = Synthetic oligonucleotide
  source 1..16: mol_type = other DNA
caagagtgacggttat

SEQ ID NO: 866 - DNA, 16 bp, synthetic construct
  misc_feature 1..16: note = Synthetic oligonucleotide
  source 1..16: mol_type = other DNA
tattattcacatggtt

SEQ ID NO: 867 - DNA, 16 bp, synthetic construct
  misc_feature 1..16: note = Synthetic oligonucleotide
  source 1..16: mol_type = other DNA
gtatccccggcgggca

SEQ ID NO: 868 - DNA, 16 bp, synthetic construct
  misc_feature 1..16: note = Synthetic oligonucleotide
  source 1..16: mol_type = other DNA
gcaggatcttggtgag

SEQ ID NO: 869 - DNA, 16 bp, synthetic construct
  misc_feature 1..16: note = Synthetic oligonucleotide
  source 1..16: mol_type = other DNA
ctccagcaggtcgcca

SEQ ID NO: 870 - DNA, 16 bp, synthetic construct
  misc_feature 1..16: note = Synthetic oligonucleotide
  source 1..16: mol_type = other DNA
atacatacttgctgtc

SEQ ID NO: 871 - DNA, 16 bp, synthetic construct
  misc_feature 1..16: note = Synthetic oligonucleotide
  source 1..16: mol_type = other DNA
tggatagcaacagctt

SEQ ID NO: 872 - DNA, 16 bp, synthetic construct
  misc_feature 1..16: note = Synthetic oligonucleotide
  source 1..16: mol_type = other DNA
tgctgagctgattaac

SEQ ID NO: 873 - DNA, 16 bp, synthetic construct
  misc_feature 1..16: note = Synthetic oligonucleotide
  source 1..16: mol_type = other DNA
aattattataactggt

SEQ ID NO: 874 - DNA, 16 bp, synthetic construct
  misc_feature 1..16: note = Synthetic oligonucleotide
  source 1..16: mol_type = other DNA
gggcaggatggacatg

SEQ ID NO: 875 - DNA, 16 bp, synthetic construct
  misc_feature 1..16: note = Synthetic oligonucleotide
  source 1..16: mol_type = other DNA
ttccacgggatgctct

SEQ ID NO: 876 - DNA, 16 bp, synthetic construct
  misc_feature 1..16: note = Synthetic oligonucleotide
  source 1..16: mol_type = other DNA
ttaaaggatctggtcc

SEQ ID NO: 877 - DNA, 16 bp, synthetic construct
  misc_feature 1..16: note = Synthetic oligonucleotide
  source 1..16: mol_type = other DNA
gtgtatgcaaagtcac

SEQ ID NO: 878 - DNA, 16 bp, synthetic construct
  misc_feature 1..16: note = Synthetic oligonucleotide
  source 1..16: mol_type = other DNA
agggaacagtggctgc

SEQ ID NO: 879 - DNA, 16 bp, synthetic construct
  misc_feature 1..16: note = Synthetic oligonucleotide
  source 1..16: mol_type = other DNA
ttattgaatggtaaga

SEQ ID NO: 880 - DNA, 16 bp, synthetic construct
  misc_feature 1..16: note = Synthetic oligonucleotide
  source 1..16: mol_type = other DNA
ctgcaagcatggccag

SEQ ID NO: 881 - DNA, 16 bp, synthetic construct
  misc_feature 1..16: note = Synthetic oligonucleotide
  source 1..16: mol_type = other DNA
acaactggatacattg

SEQ ID NO: 882 - DNA, 16 bp, synthetic construct
  misc_feature 1..16: note = Synthetic oligonucleotide
  source 1..16: mol_type = other DNA
cactttggtttcttct

SEQ ID NO: 883 - DNA, 16 bp, synthetic construct
  misc_feature 1..16: note = Synthetic oligonucleotide
  source 1..16: mol_type = other DNA
cttatggcttcggtca

SEQ ID NO: 884 - DNA, 16 bp, synthetic construct
  misc_feature 1..16: note = Synthetic oligonucleotide
  source 1..16: mol_type = other DNA
agataccaggagggct

SEQ ID NO: 885 - DNA, 16 bp, synthetic construct
  misc_feature 1..16: note = Synthetic oligonucleotide
  source 1..16: mol_type = other DNA
atagacaaggaaaggg

SEQ ID NO: 886 - DNA, 16 bp, synthetic construct
  misc_feature 1..16: note = Synthetic oligonucleotide
  source 1..16: mol_type = other DNA
cacattctcgaagtcg

SEQ ID NO: 887 - DNA, 16 bp, synthetic construct
  misc_feature 1..16: note = Synthetic oligonucleotide
  source 1..16: mol_type = other DNA
ggccgctgaccacccc

SEQ ID NO: 888 - DNA, 16 bp, synthetic construct
  misc_feature 1..16: note = Synthetic oligonucleotide
  source 1..16: mol_type = other DNA
cacccttggccacgcc

SEQ ID NO: 889 - DNA, 16 bp, synthetic construct
  misc_feature 1..16: note = Synthetic oligonucleotide
  source 1..16: mol_type = other DNA
atggagagagaccagc

SEQ ID NO: 890 - DNA, 16 bp, synthetic construct
  misc_feature 1..16: note = Synthetic oligonucleotide
  source 1..16: mol_type = other DNA
caccagagccagtgtt

SEQ ID NO: 891 - DNA, 16 bp, synthetic construct
  misc_feature 1..16: note = Synthetic oligonucleotide
  source 1..16: mol_type = other DNA
ctgccccgtgccaggt

SEQ ID NO: 892 - DNA, 16 bp, synthetic construct
  misc_feature 1..16: note = Synthetic oligonucleotide
  source 1..16: mol_type = other DNA
tgtcaaatgaggtgtg

SEQ ID NO: 893 - DNA, 16 bp, synthetic construct
  misc_feature 1..16: note = Synthetic oligonucleotide
  source 1..16: mol_type = other DNA
atgagaagggcacact

SEQ ID NO: 894 - DNA, 16 bp, synthetic construct
  misc_feature 1..16: note = Synthetic oligonucleotide
  source 1..16: mol_type = other DNA
aactcttaatatatac

SEQ ID NO: 895 - DNA, 16 bp, synthetic construct
  misc_feature 1..16: note = Synthetic oligonucleotide
  source 1..16: mol_type = other DNA
aggaacaaagccaagg

SEQ ID NO: 896 - DNA, 16 bp, synthetic construct
  misc_feature 1..16: note = Synthetic oligonucleotide
  source 1..16: mol_type = other DNA
cggcagcggtgaccag

SEQ ID NO: 897 - DNA, 16 bp, synthetic construct
  misc_feature 1..16: note = Synthetic oligonucleotide
  source 1..16: mol_type = other DNA
gccttgataggccagg

SEQ ID NO: 898 - DNA, 16 bp, synthetic construct
  misc_feature 1..16: note = Synthetic oligonucleotide
  source 1..16: mol_type = other DNA
agagaaaggagcccaa

SEQ ID NO: 899 - DNA, 16 bp, synthetic construct
  misc_feature 1..16: note = Synthetic oligonucleotide
  source 1..16: mol_type = other DNA
gtccacacagcggcca

SEQ ID NO: 900 - DNA, 16 bp, synthetic construct
  misc_feature 1..16: note = Synthetic oligonucleotide
  source 1..16: mol_type = other DNA
ggctcggcagacagca

SEQ ID NO: 901 - DNA, 16 bp, synthetic construct
  misc_feature 1..16: note = Synthetic oligonucleotide
  source 1..16: mol_type = other DNA
ggcttaaagaacatac

SEQ ID NO: 902 - DNA, 16 bp, synthetic construct
  misc_feature 1..16: note = Synthetic oligonucleotide
  source 1..16: mol_type = other DNA
ggcgacggctgtggcc

SEQ ID NO: 903 - DNA, 16 bp, synthetic construct
  misc_feature 1..16: note = Synthetic oligonucleotide
  source 1..16: mol_type = other DNA
gagcattaagacccca

SEQ ID NO: 904 - DNA, 16 bp, synthetic construct
  misc_feature 1..16: note = Synthetic oligonucleotide
  source 1..16: mol_type = other DNA
aggcagcacctggcaa

SEQ ID NO: 905 - DNA, 16 bp, synthetic construct
  misc_feature 1..16: note = Synthetic oligonucleotide
  source 1..16: mol_type = other DNA
agtggacacgggtccc

SEQ ID NO: 906 - DNA, 16 bp, synthetic construct
  misc_feature 1..16: note = Synthetic oligonucleotide
  source 1..16: mol_type = other DNA
tcacacttgtgaggac

SEQ ID NO: 907 - DNA, 16 bp, synthetic construct
  misc_feature 1..16: note = Synthetic oligonucleotide
  source 1..16: mol_type = other DNA
aaagcaacgggtgatg

SEQ ID NO: 908 - DNA, 16 bp, synthetic construct
  misc_feature 1..16: note = Synthetic oligonucleotide
  source 1..16: mol_type = other DNA
gtaagatggaaagaga

SEQ ID NO: 909 - DNA, 16 bp, synthetic construct
  misc_feature 1..16: note = Synthetic oligonucleotide
  source 1..16: mol_type = other DNA
ctgggatgctccgtct

SEQ ID NO: 910 - DNA, 16 bp, synthetic construct
  misc_feature 1..16: note = Synthetic oligonucleotide
  source 1..16: mol_type = other DNA
tgcattccagacctgg

SEQ ID NO: 911 - DNA, 16 bp, synthetic construct
  misc_feature 1..16: note = Synthetic oligonucleotide
  source 1..16: mol_type = other DNA
tgctaacaaccttcag

SEQ ID NO: 912 - DNA, 16 bp, synthetic construct
  misc_feature 1..16: note = Synthetic oligonucleotide
  source 1..16: mol_type = other DNA
taccatgccagtgcca

SEQ ID NO: 913 - DNA, 16 bp, synthetic construct
  misc_feature 1..16: note = Synthetic oligonucleotide
  source 1..16: mol_type = other DNA
cggcagcagatggcaa

SEQ ID NO: 914 - DNA, 16 bp, synthetic construct
  misc_feature 1..16: note = Synthetic oligonucleotide
  source 1..16: mol_type = other DNA
tgccaggccatggagg

SEQ ID NO: 915 - DNA, 16 bp, synthetic construct
  misc_feature 1..16: note = Synthetic oligonucleotide
  source 1..16: mol_type = other DNA
ggaggaggcacccaga

SEQ ID NO: 916 - DNA, 16 bp, synthetic construct
  misc_feature 1..16: note = Synthetic oligonucleotide
  source 1..16: mol_type = other DNA
gagcagctggcagcac

SEQ ID NO: 917 - DNA, 16 bp, synthetic construct
  misc_feature 1..16: note = Synthetic oligonucleotide
  source 1..16: mol_type = other DNA
ggaacaagagctcaat

SEQ ID NO: 918 - DNA, 16 bp, synthetic construct
  misc_feature 1..16: note = Synthetic oligonucleotide
  source 1..16: mol_type = other DNA
atccatgggaagaatc

SEQ ID NO: 919 - DNA, 16 bp, synthetic construct
  misc_feature 1..16: note = Synthetic oligonucleotide
  source 1..16: mol_type = other DNA
ctccattaatcaggga

SEQ ID NO: 920 - DNA, 16 bp, synthetic construct
  misc_feature 1..16: note = Synthetic oligonucleotide
  source 1..16: mol_type = other DNA
atagagcagagtaaag

SEQ ID NO: 921 - DNA, 16 bp, synthetic construct
  misc_feature 1..16: note = Synthetic oligonucleotide
  source 1..16: mol_type = other DNA
gcacactgccgagtca

SEQ ID NO: 922 - DNA, 16 bp, synthetic construct
  misc_feature 1..16: note = Synthetic oligonucleotide
  source 1..16: mol_type = other DNA
caggtttcttcctctg

SEQ ID NO: 923 - DNA, 16 bp, synthetic construct
  misc_feature 1..16: note = Synthetic oligonucleotide
  source 1..16: mol_type = other DNA
gtgagcttggcaggca

SEQ ID NO: 924 - DNA, 16 bp, synthetic construct
  misc_feature 1..16: note = Synthetic oligonucleotide
  source 1..16: mol_type = other DNA
tttctggctcagttcc

SEQ ID NO: 925 - DNA, 16 bp, synthetic construct
  misc_feature 1..16: note = Synthetic oligonucleotide
  source 1..16: mol_type = other DNA
ccgtaaaaatgaggag

SEQ ID NO: 926 - DNA, 16 bp, synthetic construct
  misc_feature 1..16: note = Synthetic oligonucleotide
  source 1..16: mol_type = other DNA
ggaaaaagttccatgc

SEQ ID NO: 927 - DNA, 16 bp, synthetic construct
  misc_feature 1..16: note = Synthetic oligonucleotide
  source 1..16: mol_type = other DNA
aaggagggacagttgt

SEQ ID NO: 928 - DNA, 16 bp, synthetic construct
  misc_feature 1..16: note = Synthetic oligonucleotide
  source 1..16: mol_type = other DNA
tctagaaaagttggct

SEQ ID NO: 929 - DNA, 16 bp, synthetic construct
  misc_feature 1..16: note = Synthetic oligonucleotide
  source 1..16: mol_type = other DNA
acggatccttggcgca

SEQ ID NO: 930 - DNA, 16 bp, synthetic construct
  misc_feature 1..16: note = Synthetic oligonucleotide
  source 1..16: mol_type = other DNA
tcaaggccagctccag

SEQ ID NO: 931 - DNA, 16 bp, synthetic construct
  misc_feature 1..16: note = Synthetic oligonucleotide
  source 1..16: mol_type = other DNA
acttgctggcctgtct

SEQ ID NO: 932 - DNA, 16 bp, synthetic construct
  misc_feature 1..16: note = Synthetic oligonucleotide
  source 1..16: mol_type = other DNA
ctccaggcctatgagg

SEQ ID NO: 933 - DNA, 16 bp, synthetic construct
  misc_feature 1..16: note = Synthetic oligonucleotide
  source 1..16: mol_type = other DNA
tgcggaaaccttctag

SEQ ID NO: 934 - DNA, 16 bp, synthetic construct
  misc_feature 1..16: note = Synthetic oligonucleotide
  source 1..16: mol_type = other DNA
gaggactgtgcaggag

SEQ ID NO: 935 - DNA, 16 bp, synthetic construct
  misc_feature 1..16: note = Synthetic oligonucleotide
  source 1..16: mol_type = other DNA
aaggctagcaccagct

SEQ ID NO: 936 - DNA, 16 bp, synthetic construct
  misc_feature 1..16: note = Synthetic oligonucleotide
  source 1..16: mol_type = other DNA
ggatatcctggcagtg

SEQ ID NO: 937 - DNA, 16 bp, synthetic construct
  misc_feature 1..16: note = Synthetic oligonucleotide
  source 1..16: mol_type = other DNA
gaaaaagctagtggtc

SEQ ID NO: 938 - DNA, 16 bp, synthetic construct
  misc_feature 1..16: note = Synthetic oligonucleotide
  source 1..16: mol_type = other DNA
cttgaaatgccctttc

SEQ ID NO: 939 - DNA, 16 bp, synthetic construct
  misc_feature 1..16: note = Synthetic oligonucleotide
  source 1..16: mol_type = other DNA
tacatttcagacggtg

SEQ ID NO: 940 - DNA, 16 bp, synthetic construct
  misc_feature 1..16: note = Synthetic oligonucleotide
  source 1..16: mol_type = other DNA
attatagcagccacta

SEQ ID NO: 941 - DNA, 16 bp, synthetic construct
  misc_feature 1..16: note = Synthetic oligonucleotide
  source 1..16: mol_type = other DNA
atttattcagctcatg

SEQ ID NO: 942 - DNA, 16 bp, synthetic construct
  misc_feature 1..16: note = Synthetic oligonucleotide
  source 1..16: mol_type = other DNA
tgggaaagtcaagagt

SEQ ID NO: 943 - DNA, 16 bp, synthetic construct
  misc_feature 1..16: note = Synthetic oligonucleotide
  source 1..16: mol_type = other DNA
gccaactattattatt

SEQ ID NO: 944 - DNA, 16 bp, synthetic construct
  misc_feature 1..16: note = Synthetic oligonucleotide
  source 1..16: mol_type = other DNA
ggtatccccggcgggc

SEQ ID NO: 945 - DNA, 16 bp, synthetic construct
  misc_feature 1..16: note = Synthetic oligonucleotide
  source 1..16: mol_type = other DNA
tgcaggatcttggtga

SEQ ID NO: 946 - DNA, 16 bp, synthetic construct
  misc_feature 1..16: note = Synthetic oligonucleotide
  source 1..16: mol_type = other DNA
gataagtgctcaatac

SEQ ID NO: 947 - DNA, 16 bp, synthetic construct
  misc_feature 1..16: note = Synthetic oligonucleotide
  source 1..16: mol_type = other DNA
ctggatagcaacagct

SEQ ID NO: 948 - DNA, 16 bp, synthetic construct
  misc_feature 1..16: note = Synthetic oligonucleotide
  source 1..16: mol_type = other DNA
cgccacaggccttggt

SEQ ID NO: 949 - DNA, 16 bp, synthetic construct
  misc_feature 1..16: note = Synthetic oligonucleotide
  source 1..16: mol_type = other DNA
ccaattattataactg

SEQ ID NO: 950 - DNA, 16 bp, synthetic construct
  misc_feature 1..16: note = Synthetic oligonucleotide
  source 1..16: mol_type = other DNA
agccaggctgtgccaa

SEQ ID NO: 951 - DNA, 16 bp, synthetic construct
  misc_feature 1..16: note = Synthetic oligonucleotide
  source 1..16: mol_type = other DNA
ctccaggttccacggg

SEQ ID NO: 952 - DNA, 16 bp, synthetic construct
  misc_feature 1..16: note = Synthetic oligonucleotide
  source 1..16: mol_type = other DNA
attaaaggatctggtc

SEQ ID NO: 953 - DNA, 16 bp, synthetic construct
  misc_feature 1..16: note = Synthetic oligonucleotide
  source 1..16: mol_type = other DNA
cagacatatgcaaggt

SEQ ID NO: 954 - DNA, 16 bp, synthetic construct
  misc_feature 1..16: note = Synthetic oligonucleotide
  source 1..16: mol_type = other DNA
gcccaagggagaggag

SEQ ID NO: 955 - DNA, 16 bp, synthetic construct
  misc_feature 1..16: note = Synthetic oligonucleotide
  source 1..16: mol_type = other DNA
gttattattgaatggt

SEQ ID NO: 956 - DNA, 16 bp, synthetic construct
  misc_feature 1..16: note = Synthetic oligonucleotide
  source 1..16: mol_type = other DNA
caggaggctgcaagca

SEQ ID NO: 957 - DNA, 16 bp, synthetic construct
  misc_feature 1..16: note = Synthetic oligonucleotide
  source 1..16: mol_type = other DNA
caggaagcagcccaag

SEQ ID NO: 958 - DNA, 16 bp, synthetic construct
  misc_feature 1..16: note = Synthetic oligonucleotide
  source 1..16: mol_type = other DNA
ctccactgatcagtcc

SEQ ID NO: 959 - DNA, 16 bp, synthetic construct
  misc_feature 1..16: note = Synthetic oligonucleotide
  source 1..16: mol_type = other DNA
ccaaatatgctgcaga

SEQ ID NO: 960 - DNA, 16 bp, synthetic construct
  misc_feature 1..16: note = Synthetic oligonucleotide
  source 1..16: mol_type = other DNA
agagacaggaagctgc

SEQ ID NO: 961 - DNA, 16 bp, synthetic construct
  misc_feature 1..16: note = Synthetic oligonucleotide
  source 1..16: mol_type = other DNA
cacagaaactacagag

SEQ ID NO: 962 - DNA, 16 bp, synthetic construct
  misc_feature 1..16: note = Synthetic oligonucleotide
  source 1..16: mol_type = other DNA
gggcacattctcgaag

SEQ ID NO: 963 - DNA, 16 bp, synthetic construct
  misc_feature 1..16: note = Synthetic oligonucleotide
  source 1..16: mol_type = other DNA
cggccgctgaccaccc

SEQ ID NO: 964 - DNA, 16 bp, synthetic construct
  misc_feature 1..16: note = Synthetic oligonucleotide
  source 1..16: mol_type = other DNA
gcacccttggccacgc

SEQ ID NO: 965 - DNA, 16 bp, synthetic construct
  misc_feature 1..16: note = Synthetic oligonucleotide
  source 1..16: mol_type = other DNA
ccagatggagagagac

SEQ ID NO: 966 - DNA, 16 bp, synthetic construct
  misc_feature 1..16: note = Synthetic oligonucleotide
  source 1..16: mol_type = other DNA
ggctagtgggctgcct

SEQ ID NO: 967 - DNA, 16 bp, synthetic construct
  misc_feature 1..16: note = Synthetic oligonucleotide
  source 1..16: mol_type = other DNA
ccctgccccgtgccag

SEQ ID NO: 968 - DNA, 16 bp, synthetic construct
  misc_feature 1..16: note = Synthetic oligonucleotide
  source 1..16: mol_type = other DNA
gcctaacgcagctctg

SEQ ID NO: 969 - DNA, 16 bp, synthetic construct
  misc_feature 1..16: note = Synthetic oligonucleotide
  source 1..16: mol_type = other DNA
gaggaatgagaagggc

SEQ ID NO: 970 - DNA, 16 bp, synthetic construct
  misc_feature 1..16: note = Synthetic oligonucleotide
  source 1..16: mol_type = other DNA
ccgcacggtcacatga

SEQ ID NO: 971 - DNA, 16 bp, synthetic construct
  misc_feature 1..16: note = Synthetic oligonucleotide
  source 1..16: mol_type = other DNA
gtgccacaagaagccc

SEQ ID NO: 972 - DNA, 16 bp, synthetic construct
  misc_feature 1..16: note = Synthetic oligonucleotide
  source 1..16: mol_type = other DNA
gaagttgccggcagcg

SEQ ID NO: 973 - DNA, 16 bp, synthetic construct
  misc_feature 1..16: note = Synthetic oligonucleotide
  source 1..16: mol_type = other DNA
taaattcggccgccag

SEQ ID NO: 974 - DNA, 16 bp, synthetic construct
  misc_feature 1..16: note = Synthetic oligonucleotide
  source 1..16: mol_type = other DNA
aaagaggtccacacag

SEQ ID NO: 975 - DNA, 16 bp, synthetic construct
  misc_feature 1..16: note = Synthetic oligonucleotide
  source 1..16: mol_type = other DNA
ctgttagcatcacggt

SEQ ID NO: 976 - DNA, 16 bp, synthetic construct
  misc_feature 1..16: note = Synthetic oligonucleotide
  source 1..16: mol_type = other DNA
ggccagggtgagctcc

SEQ ID NO: 977 - DNA, 16 bp, synthetic construct
  misc_feature 1..16: note = Synthetic oligonucleotide
  source 1..16: mol_type = other DNA
gagagaggagggctta

SEQ ID NO: 978 - DNA, 16 bp, synthetic construct
  misc_feature 1..16: note = Synthetic oligonucleotide
  source 1..16: mol_type = other DNA
aaaacagctgccaacc

SEQ ID NO: 979 - DNA, 16 bp, synthetic construct
  misc_feature 1..16: note = Synthetic oligonucleotide
  source 1..16: mol_type = other DNA
cgggcgacggctgtgg

SEQ ID NO: 980 - DNA, 16 bp, synthetic construct
  misc_feature 1..16: note = Synthetic oligonucleotide
  source 1..16: mol_type = other DNA
acacgagcattaagac

SEQ ID NO: 981 - DNA, 16 bp, synthetic construct
  misc_feature 1..16: note = Synthetic oligonucleotide
  source 1..16: mol_type = other DNA
gcaggcagcacctggc

SEQ ID NO: 982 - DNA, 16 bp, synthetic construct
  misc_feature 1..16: note = Synthetic oligonucleotide
  source 1..16: mol_type = other DNA
cagtggacacgggtcc

SEQ ID NO: 983 - DNA, 16 bp, synthetic construct
  misc_feature 1..16: note = Synthetic oligonucleotide
  source 1..16: mol_type = other DNA
ctgcaagtcaggcttg

SEQ ID NO: 984 - DNA, 16 bp, synthetic construct
  misc_feature 1..16: note = Synthetic oligonucleotide
  source 1..16: mol_type = other DNA
tttaaagcaacgggtg

SEQ ID NO: 985 - DNA, 16 bp, synthetic construct
  misc_feature 1..16: note = Synthetic oligonucleotide
  source 1..16: mol_type = other DNA
agctacactgaggctc

SEQ ID NO: 986 - DNA, 16 bp, synthetic construct
  misc_feature 1..16: note = Synthetic oligonucleotide
  source 1..16: mol_type = other DNA
gactttgcattccaga

SEQ ID NO: 987 - DNA, 16 bp, synthetic construct
  misc_feature 1..16: note = Synthetic oligonucleotide
  source 1..16: mol_type = other DNA
ggcagaggaaagccag

SEQ ID NO: 988 - DNA, 16 bp, synthetic construct
  misc_feature 1..16: note = Synthetic oligonucleotide
  source 1..16: mol_type = other DNA
tgtcacattccagggc

SEQ ID NO: 989 - DNA, 16 bp, synthetic construct
  misc_feature 1..16: note = Synthetic oligonucleotide
  source 1..16: mol_type = other DNA
agatagacagatgcct

SEQ ID NO: 990 - DNA, 16 bp, synthetic construct
  misc_feature 1..16: note = Synthetic oligonucleotide
  source 1..16: mol_type = other DNA
cgccaggtgccggctc

SEQ ID NO: 991 - DNA, 16 bp, synthetic construct
  misc_feature 1..16: note = Synthetic oligonucleotide
  source 1..16: mol_type = other DNA
gcggaagcatccccat

SEQ ID NO: 992 - DNA, 16 bp, synthetic construct
  misc_feature 1..16: note = Synthetic oligonucleotide
  source 1..16: mol_type = other DNA
ccccacagtgagggag

SEQ ID NO: 993 - DNA, 16 bp, synthetic construct
  misc_feature 1..16: note = Synthetic oligonucleotide
  source 1..16: mol_type = other DNA
acattgggagcagctg

SEQ ID NO: 994 - DNA, 16 bp, synthetic construct
  misc_feature 1..16: note = Synthetic oligonucleotide
  source 1..16: mol_type = other DNA
cggaacaagagctcaa

SEQ ID NO: 995 - DNA, 16 bp, synthetic construct
  misc_feature 1..16: note = Synthetic oligonucleotide
  source 1..16: mol_type = other DNA
ccctatccatgggaag

SEQ ID NO: 996 - DNA, 16 bp, synthetic construct
  misc_feature 1..16: note = Synthetic oligonucleotide
  source 1..16: mol_type = other DNA
agctaagcctccatta

SEQ ID NO: 997 - DNA, 16 bp, synthetic construct
  misc_feature 1..16: note = Synthetic oligonucleotide
  source 1..16: mol_type = other DNA
gcatagagcagagtaa

SEQ ID NO: 998 - DNA, 16 bp, synthetic construct
  misc_feature 1..16: note = Synthetic oligonucleotide
  source 1..16: mol_type = other DNA
tgcacactgccgagtc

SEQ ID NO: 999 - DNA, 16 bp, synthetic construct
  misc_feature 1..16: note = Synthetic oligonucleotide
  source 1..16: mol_type = other DNA
ccaggtttcttcctct

SEQ ID NO: 1000 - DNA, 16 bp, synthetic construct
  misc_feature 1..16: note = Synthetic oligonucleotide
  source 1..16: mol_type = other DNA
tgtgagcttggcaggc

SEQ ID NO: 1001 - DNA, 16 bp, synthetic construct
  misc_feature 1..16: note = Synthetic oligonucleotide
  source 1..16: mol_type = other DNA
gtttctggctcagttc

SEQ ID NO: 1002 - DNA, 16 bp, synthetic construct
  misc_feature 1..16: note = Synthetic oligonucleotide
  source 1..16: mol_type = other DNA
acccgtaaaaatgagg

SEQ ID NO: 1003 - DNA, 16 bp, synthetic construct
  misc_feature 1..16: note = Synthetic oligonucleotide
  source 1..16: mol_type = other DNA
acggaaaaagttccat

SEQ ID NO: 1004 - DNA, 16 bp, synthetic construct
  misc_feature 1..16: note = Synthetic oligonucleotide
  source 1..16: mol_type = other DNA
ctcaaggagggacagt

SEQ ID NO: 1005 - DNA, 16 bp, synthetic construct
  misc_feature 1..16: note = Synthetic oligonucleotide
  source 1..16: mol_type = other DNA
aaacaggtctagaaaa

SEQ ID NO: 1006 - DNA, 16 bp, synthetic construct
  misc_feature 1..16: note = Synthetic oligonucleotide
  source 1..16: mol_type = other DNA
cacttgctggcctgtc

SEQ ID NO: 1007 - DNA, 16 bp, synthetic construct
  misc_feature 1..16: note = Synthetic oligonucleotide
  source 1..16: mol_type = other DNA
ctccacggatccttgg

SEQ ID NO: 1008 - DNA, 16 bp, synthetic construct
  misc_feature 1..16: note = Synthetic oligonucleotide
  source 1..16: mol_type = other DNA
ttcaaggccagctcca

SEQ ID NO: 1009 - DNA, 16 bp, synthetic construct
  misc_feature 1..16: note = Synthetic oligonucleotide
  source 1..16: mol_type = other DNA
ataaactccaggccta

SEQ ID NO: 1010 - DNA, 16 bp, synthetic construct
  misc_feature 1..16: note = Synthetic oligonucleotide
  source 1..16: mol_type = other DNA
cgtcgctgcggaaacc

SEQ ID NO: 1011 - DNA, 16 bp, synthetic construct
  misc_feature 1..16: note = Synthetic oligonucleotide
  source 1..16: mol_type = other DNA
gtccacgccggcggcg

SEQ ID NO: 1012 - DNA, 16 bp, synthetic construct
  misc_feature 1..16: note = Synthetic oligonucleotide
  source 1..16: mol_type = other DNA
caaggctagcaccagc

SEQ ID NO: 1013 - DNA, 16 bp, synthetic construct
  misc_feature 1..16: note = Synthetic oligonucleotide
  source 1..16: mol_type = other DNA
gaaatctgggcaggat

SEQ ID NO: 1014 - DNA, 16 bp, synthetic construct
  misc_feature 1..16: note = Synthetic oligonucleotide
  source 1..16: mol_type = other DNA
caccacagctagtgag

SEQ ID NO: 1015 - DNA, 16 bp, synthetic construct
  misc_feature 1..16: note = Synthetic oligonucleotide
  source 1..16: mol_type = other DNA
cactatttccagaaca

SEQ ID NO: 1016 - DNA, 16 bp, synthetic construct
  misc_feature 1..16: note = Synthetic oligonucleotide
  source 1..16: mol_type = other DNA
aataatctcatgtcag

SEQ ID NO: 1017 - DNA, 16 bp, synthetic construct
  misc_feature 1..16: note = Synthetic oligonucleotide
  source 1..16: mol_type = other DNA
caaattatagcagcca

SEQ ID NO: 1018 - DNA, 16 bp, synthetic construct
  misc_feature 1..16: note = Synthetic oligonucleotide
  source 1..16: mol_type = other DNA
gatttattcagctcat

SEQ ID NO: 1019 - DNA, 16 bp, synthetic construct
  misc_feature 1..16: note = Synthetic oligonucleotide
  source 1..16: mol_type = other DNA
ccacagtacctatgac

SEQ ID NO: 1020 - DNA, 16 bp, synthetic construct
  misc_feature 1..16: note = Synthetic oligonucleotide
  source 1..16: mol_type = other DNA
caaatgcggaccaaaa

SEQ ID NO: 1021 - DNA, 16 bp, synthetic construct
  misc_feature 1..16: note = Synthetic oligonucleotide
  source 1..16: mol_type = other DNA
aggtatccccggcggg

SEQ ID NO: 1022 - DNA, 16 bp, synthetic construct
  misc_feature 1..16: note = Synthetic oligonucleotide
  source 1..16: mol_type = other DNA
atgcaggatcttggtg

SEQ ID NO: 1023 - DNA, 16 bp, synthetic construct
  misc_feature 1..16: note = Synthetic oligonucleotide
  source 1..16: mol_type = other DNA
cgataagtgctcaata

SEQ ID NO: 1024 - DNA, 16 bp, synthetic construct
  misc_feature 1..16: note = Synthetic oligonucleotide
  source 1..16: mol_type = other DNA
aaagaagggacttcac

SEQ ID NO: 1025 - DNA, 16 bp, synthetic construct
  misc_feature 1..16: note = Synthetic oligonucleotide
  source 1..16: mol_type = other DNA
acttagactacgggtt

SEQ ID NO: 1026 - DNA, 16 bp, synthetic construct
  misc_feature 1..16: note = Synthetic oligonucleotide
  source 1..16: mol_type = other DNA
tccttaaatgaatgtt

SEQ ID NO: 1027 - DNA, 16 bp, synthetic construct
  misc_feature 1..16: note = Synthetic oligonucleotide
  source 1..16: mol_type = other DNA
cttgatcaggctggga

SEQ ID NO: 1028 - DNA, 16 bp, synthetic construct
  misc_feature 1..16: note = Synthetic oligonucleotide
  source 1..16: mol_type = other DNA
ggtaatccgctccagg

SEQ ID NO: 1029 - DNA, 16 bp, synthetic construct
  misc_feature 1..16: note = Synthetic oligonucleotide
  source 1..16: mol_type = other DNA
tcccattaaaggatct

SEQ ID NO: 1030 - DNA, 16 bp, synthetic construct
  misc_feature 1..16: note = Synthetic oligonucleotide
  source 1..16: mol_type = other DNA
acacatgaccgaccag

SEQ ID NO: 1031 - DNA, 16 bp, synthetic construct
  misc_feature 1..16: note = Synthetic oligonucleotide
  source 1..16: mol_type = other DNA
ctccagccaagccctt

SEQ ID NO: 1032 - DNA, 16 bp, synthetic construct
  misc_feature 1..16: note = Synthetic oligonucleotide
  source 1..16: mol_type = other DNA
tctggatacactgttg

SEQ ID NO: 1033 - DNA, 16 bp, synthetic construct
  misc_feature 1..16: note = Synthetic oligonucleotide
  source 1..16: mol_type = other DNA
ggtcaggaggctgcaa

SEQ ID NO: 1034 - DNA, 16 bp, synthetic construct
  misc_feature 1..16: note = Synthetic oligonucleotide
  source 1..16: mol_type = other DNA
tgctcaggaagcagcc

SEQ ID NO: 1035 - DNA, 16 bp, synthetic construct
  misc_feature 1..16: note = Synthetic oligonucleotide
  source 1..16: mol_type = other DNA
ccctaaggcctccagt

SEQ ID NO: 1036 - DNA, 16 bp, synthetic construct
  misc_feature 1..16: note = Synthetic oligonucleotide
  source 1..16: mol_type = other DNA
ctgaacagcacctctg

SEQ ID NO: 1037 - DNA, 16 bp, synthetic construct
  misc_feature 1..16: note = Synthetic oligonucleotide
  source 1..16: mol_type = other DNA
ttagagacaggaagct

SEQ ID NO: 1038 - DNA, 16 bp, synthetic construct
  misc_feature 1..16: note = Synthetic oligonucleotide
  source 1..16: mol_type = other DNA
cttatagttaacacac

SEQ ID NO: 1039 - DNA, 16 bp, synthetic construct
  misc_feature 1..16: note = Synthetic oligonucleotide
  source 1..16: mol_type = other DNA
ctcctcgggcacattc

SEQ ID NO: 1040 - DNA, 16 bp, synthetic construct
  misc_feature 1..16: note = Synthetic oligonucleotide
  source 1..16: mol_type = other DNA
ccggccgctgaccacc

SEQ ID NO: 1041 - DNA, 16 bp, synthetic construct
  misc_feature 1..16: note = Synthetic oligonucleotide
  source 1..16: mol_type = other DNA
ggcacccttggccacg

SEQ ID NO: 1042 - DNA, 16 bp, synthetic construct
  misc_feature 1..16: note = Synthetic oligonucleotide
  source 1..16: mol_type = other DNA
gcccaagccacctccc

SEQ ID NO: 1043 - DNA, 16 bp, synthetic construct
  misc_feature 1..16: note = Synthetic oligonucleotide
  source 1..16: mol_type = other DNA
aggaaagtctcagggc

SEQ ID NO: 1044 - DNA, 16 bp, synthetic construct
  misc_feature 1..16: note = Synthetic oligonucleotide
  source 1..16: mol_type = other DNA
agcccctgccccgtgc

SEQ ID NO: 1045 - DNA, 16 bp, synthetic construct
  misc_feature 1..16: note = Synthetic oligonucleotide
  source 1..16: mol_type = other DNA
ggcctaacgcagctct

SEQ ID NO: 1046 - DNA, 16 bp, synthetic construct
  misc_feature 1..16: note = Synthetic oligonucleotide
  source 1..16: mol_type = other DNA
aggcaccaagaggatg

SEQ ID NO: 1047 - DNA, 16 bp, synthetic construct
  misc_feature 1..16: note = Synthetic oligonucleotide
  source 1..16: mol_type = other DNA
gcggatttcagacttg

SEQ ID NO: 1048 - DNA, 16 bp, synthetic construct
  misc_feature 1..16: note = Synthetic oligonucleotide
  source 1..16: mol_type = other DNA
ccggaagttgccggca

SEQ ID NO: 1049 - DNA, 16 bp, synthetic construct
  misc_feature 1..16: note = Synthetic oligonucleotide
  source 1..16: mol_type = other DNA
cgtgccacaagaagcc

SEQ ID NO: 1050 - DNA, 16 bp, synthetic construct
  misc_feature 1..16: note = Synthetic oligonucleotide
  source 1..16: mol_type = other DNA
gcctttaaattcggcc

SEQ ID NO: 1051 - DNA, 16 bp, synthetic construct
  misc_feature 1..16: note = Synthetic oligonucleotide
  source 1..16: mol_type = other DNA
gcaaagaggtccacac

SEQ ID NO: 1052 - DNA, 16 bp, synthetic construct
  misc_feature 1..16: note = Synthetic oligonucleotide
  source 1..16: mol_type = other DNA
ggcactggaggtcccg

SEQ ID NO: 1053 - DNA, 16 bp, synthetic construct
  misc_feature 1..16: note = Synthetic oligonucleotide
  source 1..16: mol_type = other DNA
ctcaactcggccaggg

SEQ ID NO: 1054 - DNA, 16 bp, synthetic construct
  misc_feature 1..16: note = Synthetic oligonucleotide
  source 1..16: mol_type = other DNA
taggagagaggagggc

SEQ ID NO: 1055 - DNA, 16 bp, synthetic construct
  misc_feature 1..16: note = Synthetic oligonucleotide
  source 1..16: mol_type = other DNA
gcaaaacagctgccaa

SEQ ID NO: 1056 - DNA, 16 bp, synthetic construct
  misc_feature 1..16: note = Synthetic oligonucleotide
  source 1..16: mol_type = other DNA
gcagcgggcgacggct

SEQ ID NO: 1057 - DNA, 16 bp, synthetic construct
  misc_feature 1..16: note = Synthetic oligonucleotide
  source 1..16: mol_type = other DNA
ctctcacacgagcatt

SEQ ID NO: 1058 - DNA, 16 bp, synthetic construct
  misc_feature 1..16: note = Synthetic oligonucleotide
  source 1..16: mol_type = other DNA
agcaggcagcacctgg

SEQ ID NO: 1059 - DNA, 16 bp, synthetic construct
  misc_feature 1..16: note = Synthetic oligonucleotide
  source 1..16: mol_type = other DNA
gcagtggacacgggtc

SEQ ID NO: 1060 - DNA, 16 bp, synthetic construct
  misc_feature 1..16: note = Synthetic oligonucleotide
  source 1..16: mol_type = other DNA
gtatggaactgcaagt

SEQ ID NO: 1061 - DNA, 16 bp, synthetic construct
  misc_feature 1..16: note = Synthetic oligonucleotide
  source 1..16: mol_type = other DNA
attttaaagcaacggg

SEQ ID NO: 1062 - DNA, 16 bp, synthetic construct
  misc_feature 1..16: note = Synthetic oligonucleotide
  source 1..16: mol_type = other DNA
aaacctaaaatagtgg

SEQ ID NO: 1063 - DNA, 16 bp, synthetic construct
  misc_feature 1..16: note = Synthetic oligonucleotide
  source 1..16: mol_type = other DNA
gggcagaggaaagcca

SEQ ID NO: 1064 - DNA, 16 bp, synthetic construct
  misc_feature 1..16: note = Synthetic oligonucleotide
  source 1..16: mol_type = other DNA
ttccatgctccttgac

SEQ ID NO: 1065 - DNA, 16 bp, synthetic construct
  misc_feature 1..16: note = Synthetic oligonucleotide
  source 1..16: mol_type = other DNA
atacactcaggtttct

SEQ ID NO: 1066 - DNA, 16 bp, synthetic construct
  misc_feature 1..16: note = Synthetic oligonucleotide
  source 1..16: mol_type = other DNA
acccaggcggttctgc

SEQ ID NO: 1067 - DNA, 16 bp, synthetic construct
  misc_feature 1..16: note = Synthetic oligonucleotide
  source 1..16: mol_type = other DNA
gtcactggagctcctg

SEQ ID NO: 1068 - DNA, 16 bp, synthetic construct
  misc_feature 1..16: note = Synthetic oligonucleotide
  source 1..16: mol_type = other DNA
aaaggcggaagcatcc

SEQ ID NO: 1069 - DNA, 16 bp, synthetic construct
  misc_feature 1..16: note = Synthetic oligonucleotide
  source 1..16: mol_type = other DNA
gtgaaatgccccacag

SEQ ID NO: 1070 - DNA, 16 bp, synthetic construct
  misc_feature 1..16: note = Synthetic oligonucleotide
  source 1..16: mol_type = other DNA
gcacattgggagcagc

SEQ ID NO: 1071 - DNA, 16 bp, synthetic construct
  misc_feature 1..16: note = Synthetic oligonucleotide
  source 1..16: mol_type = other DNA
acggaacaagagctca

SEQ ID NO: 1072 - DNA, 16 bp, synthetic construct
  misc_feature 1..16: note = Synthetic oligonucleotide
  source 1..16: mol_type = other DNA
caacgatgtttgtccc

SEQ ID NO: 1073 - DNA, 16 bp, synthetic construct
  misc_feature 1..16: note = Synthetic oligonucleotide
  source 1..16: mol_type = other DNA
gaaagctaagcctcca

SEQ ID NO: 1074 - DNA, 16 bp, synthetic construct
  misc_feature 1..16: note = Synthetic oligonucleotide
  source 1..16: mol_type = other DNA
tggcatagagcagagt

SEQ ID NO: 1075 - DNA, 16 bp, synthetic construct
  misc_feature 1..16: note = Synthetic oligonucleotide
  source 1..16: mol_type = other DNA
ctgcacactgccgagt

SEQ ID NO: 1076 - DNA, 16 bp, synthetic construct
  misc_feature 1..16: note = Synthetic oligonucleotide
  source 1..16: mol_type = other DNA
tccaggtttcttcctc

SEQ ID NO: 1077 - DNA, 16 bp, synthetic construct
  misc_feature 1..16: note = Synthetic oligonucleotide
  source 1..16: mol_type = other DNA
gtgtgagcttggcagg

SEQ ID NO: 1078 - DNA, 16 bp, synthetic construct
  misc_feature 1..16: note = Synthetic oligonucleotide
  source 1..16: mol_type = other DNA
cgtttctggctcagtt

SEQ ID NO: 1079 - DNA, 16 bp, synthetic construct
  misc_feature 1..16: note = Synthetic oligonucleotide
  source 1..16: mol_type = other DNA
tgttacccgtaaaaat

SEQ ID NO: 1080 - DNA, 16 bp, synthetic construct
  misc_feature 1..16: note = Synthetic oligonucleotide
  source 1..16: mol_type = other DNA
taacggaaaaagttcc

SEQ ID NO: 1081 - DNA, 16 bp, synthetic construct
  misc_feature 1..16: note = Synthetic oligonucleotide
  source 1..16: mol_type = other DNA
tgctcaaggagggaca

SEQ ID NO: 1082 - DNA, 16 bp, synthetic construct
  misc_feature 1..16: note = Synthetic oligonucleotide
  source 1..16: mol_type = other DNA
caaaacaggtctagaa

SEQ ID NO: 1083 - DNA, 16 bp, synthetic construct
  misc_feature 1..16: note = Synthetic oligonucleotide
  source 1..16: mol_type = other DNA
cttcaaggccagctcc

SEQ ID NO: 1084 - DNA, 16 bp, synthetic construct
  misc_feature 1..16: note = Synthetic oligonucleotide
  source 1..16: mol_type = other DNA
acacttgctggcctgt

SEQ ID NO: 1085 - DNA, 16 bp, synthetic construct
  misc_feature 1..16: note = Synthetic oligonucleotide
  source 1..16: mol_type = other DNA
ctgcaaccatgagcgc

SEQ ID NO: 1086 - DNA, 16 bp, synthetic construct
  misc_feature 1..16: note = Synthetic oligonucleotide
  source 1..16: mol_type = other DNA
ctagaggccgtgcgcg

SEQ ID NO: 1087 - DNA, 16 bp, synthetic construct
  misc_feature 1..16: note = Synthetic oligonucleotide
  source 1..16: mol_type = other DNA
gcaaggctagcaccag

SEQ ID NO: 1088 - DNA, 16 bp, synthetic construct
  misc_feature 1..16: note = Synthetic oligonucleotide
  source 1..16: mol_type = other DNA
gaaactgggaaatctg

SEQ ID NO: 1089 - DNA, 16 bp, synthetic construct
  misc_feature 1..16: note = Synthetic oligonucleotide
  source 1..16: mol_type = other DNA
gtcaagcaccacagct

SEQ ID NO: 1090 - DNA, 16 bp, synthetic construct
  misc_feature 1..16: note = Synthetic oligonucleotide
  source 1..16: mol_type = other DNA
cctcaagggcttggtt

SEQ ID NO: 1091 - DNA, 16 bp, synthetic construct
  misc_feature 1..16: note = Synthetic oligonucleotide
  source 1..16: mol_type = other DNA
aatctatgcagcaaaa

SEQ ID NO: 1092 - DNA, 16 bp, synthetic construct
  misc_feature 1..16: note = Synthetic oligonucleotide
  source 1..16: mol_type = other DNA
aacaaattatagcagc

SEQ ID NO: 1093 - DNA, 16 bp, synthetic construct
  misc_feature 1..16: note = Synthetic oligonucleotide
  source 1..16: mol_type = other DNA
gaccacagtacctatg

SEQ ID NO: 1094 - DNA, 16 bp, synthetic construct
  misc_feature 1..16: note = Synthetic oligonucleotide
  source 1..16: mol_type = other DNA
accaaatgcggaccaa

SEQ ID NO: 1095 - DNA, 16 bp, synthetic construct
  misc_feature 1..16: note = Synthetic oligonucleotide
  source 1..16: mol_type = other DNA
ggcaacctccacggat

SEQ ID NO: 1096 - DNA, 16 bp, synthetic construct
  misc_feature 1..16: note = Synthetic oligonucleotide
  source 1..16: mol_type = other DNA
gaggtatccccggcgg

SEQ ID NO: 1097 - DNA, 16 bp, synthetic construct
  misc_feature 1..16: note = Synthetic oligonucleotide
  source 1..16: mol_type = other DNA
catgcaggatcttggt

SEQ ID NO: 1098 - DNA, 16 bp, synthetic construct
  misc_feature 1..16: note = Synthetic oligonucleotide
  source 1..16: mol_type = other DNA
tgcttggtacccgata

SEQ ID NO: 1099 - DNA, 16 bp, synthetic construct
  misc_feature 1..16: note = Synthetic oligonucleotide
  source 1..16: mol_type = other DNA
cctaaagaagggactt

SEQ ID NO: 1100 - DNA, 16 bp, synthetic construct
  misc_feature 1..16: note = Synthetic oligonucleotide
  source 1..16: mol_type = other DNA
aggcattgacttgtca

SEQ ID NO: 1101 - DNA, 16 bp, synthetic construct
  misc_feature 1..16: note = Synthetic oligonucleotide
  source 1..16: mol_type = other DNA
tacctagcatctgctg

SEQ ID NO: 1102 - DNA, 16 bp, synthetic construct
  misc_feature 1..16: note = Synthetic oligonucleotide
  source 1..16: mol_type = other DNA
acagactaggagcctg

SEQ ID NO: 1103 - DNA, 16 bp, synthetic construct
  misc_feature 1..16: note = Synthetic oligonucleotide
  source 1..16: mol_type = other DNA
ccgcccggtaccgtgg

SEQ ID NO: 1104 - DNA, 16 bp, synthetic construct
  misc_feature 1..16: note = Synthetic oligonucleotide
  source 1..16: mol_type = other DNA
aggcatcccagacagg

SEQ ID NO: 1105 - DNA, 16 bp, synthetic construct
  misc_feature 1..16: note = Synthetic oligonucleotide
  source 1..16: mol_type = other DNA
gcacacatgaccgacc

SEQ ID NO: 1106 - DNA, 16 bp, synthetic construct
  misc_feature 1..16: note = Synthetic oligonucleotide
  source 1..16: mol_type = other DNA
ccccatgccagcccaa

SEQ ID NO: 1107 - DNA, 16 bp, synthetic construct
  misc_feature 1..16: note = Synthetic oligonucleotide
  source 1..16: mol_type = other DNA
attaatcttctggata

SEQ ID NO: 1108 - DNA, 16 bp, synthetic construct
  misc_feature 1..16: note = Synthetic oligonucleotide
  source 1..16: mol_type = other DNA
ggacagggtcaggagg

SEQ ID NO: 1109 - DNA, 16 bp, synthetic construct
  misc_feature 1..16: note = Synthetic oligonucleotide
  source 1..16: mol_type = other DNA
ggatacaggtgctcag

SEQ ID NO: 1110 - DNA, 16 bp, synthetic construct
  misc_feature 1..16: note = Synthetic oligonucleotide
  source 1..16: mol_type = other DNA
acacacactgtctacc

SEQ ID NO: 1111 - DNA, 16 bp, synthetic construct
  misc_feature 1..16: note = Synthetic oligonucleotide
  source 1..16: mol_type = other DNA
cctcaggtggaatcag

SEQ ID NO: 1112 - DNA, 16 bp, synthetic construct
  misc_feature 1..16: note = Synthetic oligonucleotide
  source 1..16: mol_type = other DNA
gaataacagtgatgtc

SEQ ID NO: 1113 - DNA, 16 bp, synthetic construct
  misc_feature 1..16: note = Synthetic oligonucleotide
  source 1..16: mol_type = other DNA
accttatagttaacac

SEQ ID NO: 1114 - DNA, 16 bp, synthetic construct
  misc_feature 1..16: note = Synthetic oligonucleotide
  source 1..16: mol_type = other DNA
tcctcctcgggcacat

SEQ ID NO: 1115 - DNA, 16 bp, synthetic construct
  misc_feature 1..16: note = Synthetic oligonucleotide
  source 1..16: mol_type = other DNA
cccggccgctgaccac

SEQ ID NO: 1116 - DNA, 16 bp, synthetic construct
  misc_feature 1..16: note = Synthetic oligonucleotide
  source 1..16: mol_type = other DNA
tggcacccttggccac

SEQ ID NO: 1117 - DNA, 16 bp, synthetic construct
  misc_feature 1..16: note = Synthetic oligonucleotide
  source 1..16: mol_type = other DNA
ggtcaaggctgaactc

SEQ ID NO: 1118 - DNA, 16 bp, synthetic construct
  misc_feature 1..16: note = Synthetic oligonucleotide
  source 1..16: mol_type = other DNA
taggaaagtctcaggg

SEQ ID NO: 1119 - DNA, 16 bp, synthetic construct
  misc_feature 1..16: note = Synthetic oligonucleotide
  source 1..16: mol_type = other DNA
aggcaatagtgactgt

SEQ ID NO: 1120 - DNA, 16 bp, synthetic construct
  misc_feature 1..16: note = Synthetic oligonucleotide
  source 1..16: mol_type = other DNA
ctggagactggaggcc

SEQ ID NO: 1121 - DNA, 16 bp, synthetic construct
  misc_feature 1..16: note = Synthetic oligonucleotide
  source 1..16: mol_type = other DNA
gaaagagaggcaccaa

SEQ ID NO: 1122 - DNA, 16 bp, synthetic construct
  misc_feature 1..16: note = Synthetic oligonucleotide
  source 1..16: mol_type = other DNA
tgcggatttcagactt

SEQ ID NO: 1123 - DNA, 16 bp, synthetic construct
  misc_feature 1..16: note = Synthetic oligonucleotide
  source 1..16: mol_type = other DNA
gaataaactccaggcc

SEQ ID NO: 1124 - DNA, 16 bp, synthetic construct
  misc_feature 1..16: note = Synthetic oligonucleotide
  source 1..16: mol_type = other DNA
gtagaggcaggcatcg

SEQ ID NO: 1125 - DNA, 16 bp, synthetic construct
  misc_feature 1..16: note = Synthetic oligonucleotide
  source 1..16: mol_type = other DNA
cagaagggttcggcct

SEQ ID NO: 1126 - DNA, 16 bp, synthetic construct
  misc_feature 1..16: note = Synthetic oligonucleotide
  source 1..16: mol_type = other DNA
ggctttgtttgcttga

SEQ ID NO: 1127 - DNA, 16 bp, synthetic construct
  misc_feature 1..16: note = Synthetic oligonucleotide
  source 1..16: mol_type = other DNA
gggcaaagaggtccac

SEQ ID NO: 1128 - DNA, 16 bp, synthetic construct
  misc_feature 1..16: note = Synthetic oligonucleotide
  source 1..16: mol_type = other DNA
catcaggcctacttca

SEQ ID NO: 1129 - DNA, 16 bp, synthetic construct
  misc_feature 1..16: note = Synthetic oligonucleotide
  source 1..16: mol_type = other DNA
gagaagtggatcagtc

SEQ ID NO: 1130 - DNA, 16 bp, synthetic construct
  misc_feature 1..16: note = Synthetic oligonucleotide
  source 1..16: mol_type = other DNA
tgcaaaaagggcctgg

SEQ ID NO: 1131 - DNA, 16 bp, synthetic construct
  misc_feature 1..16: note = Synthetic oligonucleotide
  source 1..16: mol_type = other DNA
ctgcaaaacagctgcc

SEQ ID NO: 1132 - DNA, 16 bp, synthetic construct
  misc_feature 1..16: note = Synthetic oligonucleotide
  source 1..16: mol_type = other DNA
gcgcagcgggcgacgg

SEQ ID NO: 1133 - DNA, 16 bp, synthetic construct
  misc_feature 1..16: note = Synthetic oligonucleotide
  source 1..16: mol_type = other DNA
atccagccagctccac

SEQ ID NO: 1134 - DNA, 16 bp, synthetic construct
  misc_feature 1..16: note = Synthetic oligonucleotide
  source 1..16: mol_type = other DNA
tagcaggcagcacctg

SEQ ID NO: 1135 - DNA, 16 bp, synthetic construct
  misc_feature 1..16: note = Synthetic oligonucleotide
  source 1..16: mol_type = other DNA
ggcagtggacacgggt

SEQ ID NO: 1136 - DNA, 16 bp, synthetic construct
  misc_feature 1..16: note = Synthetic oligonucleotide
  source 1..16: mol_type = other DNA
ggcagaaccagagtat

SEQ ID NO: 1137 - DNA, 16 bp, synthetic construct
  misc_feature 1..16: note = Synthetic oligonucleotide
  source 1..16: mol_type = other DNA
caatagttgcctatac

SEQ ID NO: 1138 - DNA, 16 bp, synthetic construct
  misc_feature 1..16: note = Synthetic oligonucleotide
  source 1..16: mol_type = other DNA
agacacacccattggc

SEQ ID NO: 1139 - DNA, 16 bp, synthetic construct
  misc_feature 1..16: note = Synthetic oligonucleotide
  source 1..16: mol_type = other DNA
ggccgggattccatgc

SEQ ID NO: 1140 - DNA, 16 bp, synthetic construct
  misc_feature 1..16: note = Synthetic oligonucleotide
  source 1..16: mol_type = other DNA
acgcagcaccccaccc

SEQ ID NO: 1141 - DNA, 16 bp, synthetic construct
  misc_feature 1..16: note = Synthetic oligonucleotide
  source 1..16: mol_type = other DNA
aaggagagttatacac

SEQ ID NO: 1142 - DNA, 16 bp, synthetic construct
  misc_feature 1..16: note = Synthetic oligonucleotide
  source 1..16: mol_type = other DNA
ggacacaaccgtgtat

SEQ ID NO: 1143 - DNA, 16 bp, synthetic construct
  misc_feature 1..16: note = Synthetic oligonucleotide
  source 1..16: mol_type = other DNA
acccatcctgggatgg

SEQ ID NO: 1144 - DNA, 16 bp, synthetic construct
  misc_feature 1..16: note = Synthetic oligonucleotide
  source 1..16: mol_type = other DNA
ggaaaggcggaagcat

SEQ ID NO: 1145 - DNA, 16 bp, synthetic construct
  misc_feature 1..16: note = Synthetic oligonucleotide
  source 1..16: mol_type = other DNA
ttgaatggtgaaatgc

SEQ ID NO: 1146 - DNA, 16 bp, synthetic construct
  misc_feature 1..16: note = Synthetic oligonucleotide
  source 1..16: mol_type = other DNA
cggcacattgggagca

SEQ ID NO: 1147 - DNA, 16 bp, synthetic construct
  misc_feature 1..16: note = Synthetic oligonucleotide
  source 1..16: mol_type = other DNA
cacggaacaagagctc

SEQ ID NO: 1148 - DNA, 16 bp, synthetic construct
  misc_feature 1..16: note = Synthetic oligonucleotide
  source 1..16: mol_type = other DNA
ccccaacgatgtttgt

SEQ ID NO: 1149 - DNA, 16 bp, synthetic construct
  misc_feature 1..16: note = Synthetic oligonucleotide
  source 1..16: mol_type = other DNA
cagaaagctaagcctc

SEQ ID NO: 1150 - DNA, 16 bp, synthetic construct
  misc_feature 1..16: note = Synthetic oligonucleotide
  source 1..16: mol_type = other DNA
gcacagcctggcatag

SEQ ID NO: 1151 - DNA, 16 bp, synthetic construct
  misc_feature 1..16: note = Synthetic oligonucleotide
  source 1..16: mol_type = other DNA
actgcacactgccgag

SEQ ID NO: 1152 - DNA, 16 bp, synthetic construct
  misc_feature 1..16: note = Synthetic oligonucleotide
  source 1..16: mol_type = other DNA
gttccaggtttcttcc

SEQ ID NO: 1153 - DNA, 16 bp, synthetic construct
  misc_feature 1..16: note = Synthetic oligonucleotide
  source 1..16: mol_type = other DNA
tgtgtgagcttggcag

SEQ ID NO: 1154 - DNA, 16 bp, synthetic construct
  misc_feature 1..16: note = Synthetic oligonucleotide
  source 1..16: mol_type = other DNA
agccagcccaatctgc

SEQ ID NO: 1155 - DNA, 16 bp, synthetic construct
  misc_feature 1..16: note = Synthetic oligonucleotide
  source 1..16: mol_type = other DNA
cctcactgttacccgt

SEQ ID NO: 1156 - DNA, 16 bp, synthetic construct
  misc_feature 1..16: note = Synthetic oligonucleotide
  source 1..16: mol_type = other DNA
gataacggaaaaagtt

SEQ ID NO: 1157 - DNA, 16 bp, synthetic construct
  misc_feature 1..16: note = Synthetic oligonucleotide
  source 1..16: mol_type = other DNA
ataaatgtctgcttgc

SEQ ID NO: 1158 - DNA, 16 bp, synthetic construct
  misc_feature 1..16: note = Synthetic oligonucleotide
  source 1..16: mol_type = other DNA
agcaaaacaggtctag

SEQ ID NO: 1159 - DNA, 16 bp, synthetic construct
  misc_feature 1..16: note = Synthetic oligonucleotide
  source 1..16: mol_type = other DNA
acttcaaggccagctc

SEQ ID NO: 1160 - DNA, 16 bp, synthetic construct
  misc_feature 1..16: note = Synthetic oligonucleotide
  source 1..16: mol_type = other DNA
aactgaacggcggcgc

SEQ ID NO: 1161 - DNA, 16 bp, synthetic construct
  misc_feature 1..16: note = Synthetic oligonucleotide
  source 1..16: mol_type = other DNA
acctagaggccgtgcg

SEQ ID NO: 1162 - DNA, 16 bp, synthetic construct
  misc_feature 1..16: note = Synthetic oligonucleotide
  source 1..16: mol_type = other DNA
cgcaaggctagcacca

SEQ ID NO: 1163 - DNA, 16 bp, synthetic construct
  misc_feature 1..16: note = Synthetic oligonucleotide
  source 1..16: mol_type = other DNA
ggcgaggcagaaactg

SEQ ID NO: 1164 - DNA, 16 bp, synthetic construct
  misc_feature 1..16: note = Synthetic oligonucleotide
  source 1..16: mol_type = other DNA
tcaaggataagtgact

SEQ ID NO: 1165 - DNA, 16 bp, synthetic construct
  misc_feature 1..16: note = Synthetic oligonucleotide
  source 1..16: mol_type = other DNA
agaaacatcctcaagg

SEQ ID NO: 1166 - DNA, 16 bp, synthetic construct
  misc_feature 1..16: note = Synthetic oligonucleotide
  source 1..16: mol_type = other DNA
taatctatgcagcaaa

SEQ ID NO: 1167 - DNA, 16 bp, synthetic construct
  misc_feature 1..16: note = Synthetic oligonucleotide
  source 1..16: mol_type = other DNA
ccaaatttccacatga

SEQ ID NO: 1168 - DNA, 16 bp, synthetic construct
  misc_feature 1..16: note = Synthetic oligonucleotide
  source 1..16: mol_type = other DNA
aaggaatacctgaagg

SEQ ID NO: 1169 - DNA, 16 bp, synthetic construct
  misc_feature 1..16: note = Synthetic oligonucleotide
  source 1..16: mol_type = other DNA
cctcagatacctctgc

SEQ ID NO: 1170 - DNA, 16 bp, synthetic construct
  misc_feature 1..16: note = Synthetic oligonucleotide
  source 1..16: mol_type = other DNA
gtatagtagatgataa

SEQ ID NO: 1171 - DNA, 16 bp, synthetic construct
  misc_feature 1..16: note = Synthetic oligonucleotide
  source 1..16: mol_type = other DNA
tgccaggcaacctcca

SEQ ID NO: 1172 - DNA, 16 bp, synthetic construct
  misc_feature 1..16: note = Synthetic oligonucleotide
  source 1..16: mol_type = other DNA
tgaggtatccccggcg

SEQ ID NO: 1173 - DNA, 16 bp, synthetic construct
  misc_feature 1..16: note = Synthetic oligonucleotide
  source 1..16: mol_type = other DNA
acatgcaggatcttgg

SEQ ID NO: 1174 - DNA, 16 bp, synthetic construct
  misc_feature 1..16: note = Synthetic oligonucleotide
  source 1..16: mol_type = other DNA
agccagtagttactgt

SEQ ID NO: 1175 - DNA, 16 bp, synthetic construct
  misc_feature 1..16: note = Synthetic oligonucleotide
  source 1..16: mol_type = other DNA
gaagatgtgacatcca

SEQ ID NO: 1176 - DNA, 16 bp, synthetic construct
  misc_feature 1..16: note = Synthetic oligonucleotide
  source 1..16: mol_type = other DNA
gagcagactgatggaa

SEQ ID NO: 1177 - DNA, 16 bp, synthetic construct
  misc_feature 1..16: note = Synthetic oligonucleotide
  source 1..16: mol_type = other DNA
gtggtaacagcctcct

SEQ ID NO: 1178 - DNA, 16 bp, synthetic construct
  misc_feature 1..16: note = Synthetic oligonucleotide
  source 1..16: mol_type = other DNA
ggacagactaggagcc

SEQ ID NO: 1179 - DNA, 16 bp, synthetic construct
  misc_feature 1..16: note = Synthetic oligonucleotide
  source 1..16: mol_type = other DNA
attcatccgcccggta

SEQ ID NO: 1180 - DNA, 16 bp, synthetic construct
  misc_feature 1..16: note = Synthetic oligonucleotide
  source 1..16: mol_type = other DNA
aggtaggcagaggcat

SEQ ID NO: 1181 - DNA, 16 bp, synthetic construct
  misc_feature 1..16: note = Synthetic oligonucleotide
  source 1..16: mol_type = other DNA
ggccgggtcagcacac

SEQ ID NO: 1182 - DNA, 16 bp, synthetic construct
  misc_feature 1..16: note = Synthetic oligonucleotide
  source 1..16: mol_type = other DNA
ggcccatgcttgtggc

SEQ ID NO: 1183 - DNA, 16 bp, synthetic construct
  misc_feature 1..16: note = Synthetic oligonucleotide
  source 1..16: mol_type = other DNA
aggaatggattaatct

SEQ ID NO: 1184 - DNA, 16 bp, synthetic construct
  misc_feature 1..16: note = Synthetic oligonucleotide
  source 1..16: mol_type = other DNA
tctaagtgcaggcggt

SEQ ID NO: 1185 - DNA, 16 bp, synthetic construct
  misc_feature 1..16: note = Synthetic oligonucleotide
  source 1..16: mol_type = other DNA
cagcaaggtgggcaga

SEQ ID NO: 1186 - DNA, 16 bp, synthetic construct
  misc_feature 1..16: note = Synthetic oligonucleotide
  source 1..16: mol_type = other DNA
gcacagtccgaactgt

SEQ ID NO: 1187 - DNA, 16 bp, synthetic construct
  misc_feature 1..16: note = Synthetic oligonucleotide
  source 1..16: mol_type = other DNA
gcggaaatggcctggc

SEQ ID NO: 1188 - DNA, 16 bp, synthetic construct
  misc_feature 1..16: note = Synthetic oligonucleotide
  source 1..16: mol_type = other DNA
ggagaataacagtgat

SEQ ID NO: 1189 - DNA, 16 bp, synthetic construct
  misc_feature 1..16: note = Synthetic oligonucleotide
  source 1..16: mol_type = other DNA
aaccttatagttaaca

SEQ ID NO: 1190 - DNA, 16 bp, synthetic construct
  misc_feature 1..16: note = Synthetic oligonucleotide
  source 1..16: mol_type = other DNA
gtcctcctcgggcaca

SEQ ID NO: 1191 - DNA, 16 bp, synthetic construct
  misc_feature 1..16: note = Synthetic oligonucleotide
  source 1..16: mol_type = other DNA
cacacttgctggcctg

SEQ ID NO: 1192 - DNA, 16 bp, synthetic construct
  misc_feature 1..16: note = Synthetic oligonucleotide
  source 1..16: mol_type = other DNA
tcccggccgctgacca

SEQ ID NO: 1193 - DNA, 16 bp, synthetic construct
  misc_feature 1..16: note = Synthetic oligonucleotide
  source 1..16: mol_type = other DNA
ctggcacccttggcca

SEQ ID NO: 1194 - DNA, 16 bp, synthetic construct
  misc_feature 1..16: note = Synthetic oligonucleotide
  source 1..16: mol_type = other DNA
agacatcaccggattt

SEQ ID NO: 1195 - DNA, 16 bp, synthetic construct
  misc_feature 1..16: note = Synthetic oligonucleotide
  source 1..16: mol_type = other DNA
ctgtaggaaagtctca

SEQ ID NO: 1196 - DNA, 16 bp, synthetic construct
  misc_feature 1..16: note = Synthetic oligonucleotide
  source 1..16: mol_type = other DNA
ggacacacaatcacct

SEQ ID NO: 1197 - DNA, 16 bp, synthetic construct
  misc_feature 1..16: note = Synthetic oligonucleotide
  source 1..16: mol_type = other DNA
cagtaacagttctaac

SEQ ID NO: 1198 - DNA, 16 bp, synthetic construct
  misc_feature 1..16: note = Synthetic oligonucleotide
  source 1..16: mol_type = other DNA
cttattatccctttcc

SEQ ID NO: 1199 - DNA, 16 bp, synthetic construct
  misc_feature 1..16: note = Synthetic oligonucleotide
  source 1..16: mol_type = other DNA
tcaaattctgcaggaa

SEQ ID NO: 1200 - DNA, 16 bp, synthetic construct
  misc_feature 1..16: note = Synthetic oligonucleotide
  source 1..16: mol_type = other DNA
ccgaataaactccagg

SEQ ID NO: 1201 - DNA, 16 bp, synthetic construct
  misc_feature 1..16: note = Synthetic oligonucleotide
  source 1..16: mol_type = other DNA
gagtagaggcaggcat

SEQ ID NO: 1202 - DNA, 16 bp, synthetic construct
  misc_feature 1..16: note = Synthetic oligonucleotide
  source 1..16: mol_type = other DNA
ccaaagccagaagggt

SEQ ID NO: 1203 - DNA, 16 bp, synthetic construct
  misc_feature 1..16: note = Synthetic oligonucleotide
  source 1..16: mol_type = other DNA
ttctaagtgccacggg

SEQ ID NO: 1204 - DNA, 16 bp, synthetic construct
  misc_feature 1..16: note = Synthetic oligonucleotide
  source 1..16: mol_type = other DNA
caatgatgtcctcccc

SEQ ID NO: 1205 - DNA, 16 bp, synthetic construct
  misc_feature 1..16: note = Synthetic oligonucleotide
  source 1..16: mol_type = other DNA
tcccgatcaaatgtcc

SEQ ID NO: 1206 - DNA, 16 bp, synthetic construct
  misc_feature 1..16: note = Synthetic oligonucleotide
  source 1..16: mol_type = other DNA
gcagagaagtggatca

SEQ ID NO: 1207 - DNA, 16 bp, synthetic construct
  misc_feature 1..16: note = Synthetic oligonucleotide
  source 1..16: mol_type = other DNA
tgccaacctgcaaaaa

SEQ ID NO: 1208 - DNA, 16 bp, synthetic construct
  misc_feature 1..16: note = Synthetic oligonucleotide
  source 1..16: mol_type = other DNA
atacagtcctgcaaaa

SEQ ID NO: 1209 - DNA, 16 bp, synthetic construct
  misc_feature 1..16: note = Synthetic oligonucleotide
  source 1..16: mol_type = other DNA
agctcagcagctcctc

SEQ ID NO: 1210 - DNA, 16 bp, synthetic construct
  misc_feature 1..16: note = Synthetic oligonucleotide
  source 1..16: mol_type = other DNA
atccaggaggccaaag

SEQ ID NO: 1211 - DNA, 16 bp, synthetic construct
  misc_feature 1..16: note = Synthetic oligonucleotide
  source 1..16: mol_type = other DNA
gggtagcaggcagcac

SEQ ID NO: 1212 - DNA, 16 bp, synthetic construct
  misc_feature 1..16: note = Synthetic oligonucleotide
  source 1..16: mol_type = other DNA
tggcagtggacacggg

SEQ ID NO: 1213 - DNA, 16 bp, synthetic construct
  misc_feature 1..16: note = Synthetic oligonucleotide
  source 1..16: mol_type = other DNA
ggagaagtaaggtcac

SEQ ID NO: 1214 - DNA, 16 bp, synthetic construct
  misc_feature 1..16: note = Synthetic oligonucleotide
  source 1..16: mol_type = other DNA
gtcaatagttgcctat

SEQ ID NO: 1215 - DNA, 16 bp, synthetic construct
  misc_feature 1..16: note = Synthetic oligonucleotide
  source 1..16: mol_type = other DNA
gttcaagggtaagccg

SEQ ID NO: 1216 - DNA, 16 bp, synthetic construct
  misc_feature 1..16: note = Synthetic oligonucleotide
  source 1..16: mol_type = other DNA
tggcacaaactgacac

SEQ ID NO: 1217 - DNA, 16 bp, synthetic construct
  misc_feature 1..16: note = Synthetic oligonucleotide
  source 1..16: mol_type = other DNA
ttaagagtggactcct

SEQ ID NO: 1218 - DNA, 16 bp, synthetic construct
  misc_feature 1..16: note = Synthetic oligonucleotide
  source 1..16: mol_type = other DNA
ccaaagtgcagacggc

SEQ ID NO: 1219 - DNA, 16 bp, synthetic construct
  misc_feature 1..16: note = Synthetic oligonucleotide
  source 1..16: mol_type = other DNA
ggccacggtcacctgc

SEQ ID NO: 1220 - DNA, 16 bp, synthetic construct
  misc_feature 1..16: note = Synthetic oligonucleotide
  source 1..16: mol_type = other DNA
ccccagacacccatcc

SEQ ID NO: 1221 - DNA, 16 bp, synthetic construct
  misc_feature 1..16: note = Synthetic oligonucleotide
  source 1..16: mol_type = other DNA
ccggaaaggcggaagc

SEQ ID NO: 1222 - DNA, 16 bp, synthetic construct
  misc_feature 1..16: note = Synthetic oligonucleotide
  source 1..16: mol_type = other DNA
gcacagctcgacctgt

SEQ ID NO: 1223 - DNA, 16 bp, synthetic construct
  misc_feature 1..16: note = Synthetic oligonucleotide
  source 1..16: mol_type = other DNA
ggacatcggcacattg

SEQ ID NO: 1224 - DNA, 16 bp, synthetic construct
  misc_feature 1..16: note = Synthetic oligonucleotide
  source 1..16: mol_type = other DNA
gcacggaacaagagct

SEQ ID NO: 1225 - DNA, 16 bp, synthetic construct
  misc_feature 1..16: note = Synthetic oligonucleotide
  source 1..16: mol_type = other DNA
tttcacactcaccccc

SEQ ID NO: 1226 - DNA, 16 bp, synthetic construct
  misc_feature 1..16: note = Synthetic oligonucleotide
  source 1..16: mol_type = other DNA
atccagaaagctaagc

SEQ ID NO: 1227 - DNA, 16 bp, synthetic construct
  misc_feature 1..16: note = Synthetic oligonucleotide
  source 1..16: mol_type = other DNA
tgctagcacagcctgg

SEQ ID NO: 1228 - DNA, 16 bp, synthetic construct
  misc_feature 1..16: note = Synthetic oligonucleotide
  source 1..16: mol_type = other DNA
cactgcacactgccga

SEQ ID NO: 1229 - DNA, 16 bp, synthetic construct
  misc_feature 1..16: note = Synthetic oligonucleotide
  source 1..16: mol_type = other DNA
ggttccaggtttcttc

SEQ ID NO: 1230 - DNA, 16 bp, synthetic construct
  misc_feature 1..16: note = Synthetic oligonucleotide
  source 1..16: mol_type = other DNA
ctgtgtgagcttggca

SEQ ID NO: 1231 - DNA, 16 bp, synthetic construct
  misc_feature 1..16: note = Synthetic oligonucleotide
  source 1..16: mol_type = other DNA
tcagagccagcccaat

SEQ ID NO: 1232 - DNA, 16 bp, synthetic construct
  misc_feature 1..16: note = Synthetic oligonucleotide
  source 1..16: mol_type = other DNA
gagcttcctggtctgt

SEQ ID NO: 1233 - DNA, 16 bp, synthetic construct
  misc_feature 1..16: note = Synthetic oligonucleotide
  source 1..16: mol_type = other DNA
gtgataacggaaaaag

SEQ ID NO: 1234 - DNA, 16 bp, synthetic construct
  misc_feature 1..16: note = Synthetic oligonucleotide
  source 1..16: mol_type = other DNA
agataaatgtctgctt

SEQ ID NO: 1235 - DNA, 16 bp, synthetic construct
  misc_feature 1..16: note = Synthetic oligonucleotide
  source 1..16: mol_type = other DNA
ttcaagttacaaaagc

SEQ ID NO: 1236 - DNA, 16 bp, synthetic construct
  misc_feature 1..16: note = Synthetic oligonucleotide
  source 1..16: mol_type = other DNA
gcaacttcaaggccag

SEQ ID NO: 1237 - DNA, 16 bp, synthetic construct
  misc_feature 1..16: note = Synthetic oligonucleotide
  source 1..16: mol_type = other DNA
agccagtctcactgcc

SEQ ID NO: 1238 - DNA, 16 bp, synthetic construct
  misc_feature 1..16: note = Synthetic oligonucleotide
  source 1..16: mol_type = other DNA
gctgacggtgcccatg

SEQ ID NO: 1239 - DNA, 16 bp, synthetic construct
  misc_feature 1..16: note = Synthetic oligonucleotide
  source 1..16: mol_type = other DNA
gaacgcaaggctagca

SEQ ID NO: 1240 - DNA, 16 bp, synthetic construct
  misc_feature 1..16: note = Synthetic oligonucleotide
  source 1..16: mol_type = other DNA
ccaaatcggaacccac

SEQ ID NO: 1241 - DNA, 16 bp, synthetic construct
  misc_feature 1..16: note = Synthetic oligonucleotide
  source 1..16: mol_type = other DNA
acagaactttcccttc

SEQ ID NO: 1242 - DNA, 16 bp, synthetic construct
  misc_feature 1..16: note = Synthetic oligonucleotide
  source 1..16: mol_type = other DNA
taaattcgattcccac

SEQ ID NO: 1243 - DNA, 16 bp, synthetic construct
  misc_feature 1..16: note = Synthetic oligonucleotide
  source 1..16: mol_type = other DNA
aggcagtaatgggcaa

SEQ ID NO: 1244 - DNA, 16 bp, synthetic construct
  misc_feature 1..16: note = Synthetic oligonucleotide
  source 1..16: mol_type = other DNA
tccaacactgaggacc

SEQ ID NO: 1245 - DNA, 16 bp, synthetic construct
  misc_feature 1..16: note = Synthetic oligonucleotide
  source 1..16: mol_type = other DNA
aaaggcaacacttctt

SEQ ID NO: 1246 - DNA, 16 bp, synthetic construct
  misc_feature 1..16: note = Synthetic oligonucleotide
  source 1..16: mol_type = other DNA
caatatttactggttg

SEQ ID NO: 1247 - DNA, 16 bp, synthetic construct
  misc_feature 1..16: note = Synthetic oligonucleotide
  source 1..16: mol_type = other DNA
cttacaaattacaaca

SEQ ID NO: 1248 - DNA, 16 bp, synthetic construct
  misc_feature 1..16: note = Synthetic oligonucleotide
  source 1..16: mol_type = other DNA
tctgactgcgagaggt

SEQ ID NO: 1249 - DNA, 16 bp, synthetic construct
  misc_feature 1..16: note = Synthetic oligonucleotide
  source 1..16: mol_type = other DNA
tggtgaggtatccccg

SEQ ID NO: 1250 - DNA, 16 bp, synthetic construct
  misc_feature 1..16: note = Synthetic oligonucleotide
  source 1..16: mol_type = other DNA
aagacatgcaggatct

SEQ ID NO: 1251 - DNA, 16 bp, synthetic construct
  misc_feature 1..16: note = Synthetic oligonucleotide
  source 1..16: mol_type = other DNA
gaccaatgggtttgat

SEQ ID NO: 1252 - DNA, 16 bp, synthetic construct
  misc_feature 1..16: note = Synthetic oligonucleotide
  source 1..16: mol_type = other DNA
gagaatacccagtccc

SEQ ID NO: 1253 - DNA, 16 bp, synthetic construct
  misc_feature 1..16: note = Synthetic oligonucleotide
  source 1..16: mol_type = other DNA
gctcaagggaaaggcc

SEQ ID NO: 1254 - DNA, 16 bp, synthetic construct
  misc_feature 1..16: note = Synthetic oligonucleotide
  source 1..16: mol_type = other DNA
ggacaagagtgcatca

SEQ ID NO: 1255 - DNA, 16 bp, synthetic construct
  misc_feature 1..16: note = Synthetic oligonucleotide
  source 1..16: mol_type = other DNA
ggccttacctgatcaa

SEQ ID NO: 1256 - DNA, 16 bp, synthetic construct
  misc_feature 1..16: note = Synthetic oligonucleotide
  source 1..16: mol_type = other DNA
ctagaacccttcattc

SEQ ID NO: 1257 - DNA, 16 bp, synthetic construct
  misc_feature 1..16: note = Synthetic oligonucleotide
  source 1..16: mol_type = other DNA
tctcacctggttggaa

SEQ ID NO: 1258 - DNA, 16 bp, synthetic construct
  misc_feature 1..16: note = Synthetic oligonucleotide
  source 1..16: mol_type = other DNA
gttaagagtgcagggt

SEQ ID NO: 1259 - DNA, 16 bp, synthetic construct
  misc_feature 1..16: note = Synthetic oligonucleotide
  source 1..16: mol_type = other DNA
ccgtaggtcttggcta

SEQ ID NO: 1260 - DNA, 16 bp, synthetic construct
  misc_feature 1..16: note = Synthetic oligonucleotide
  source 1..16: mol_type = other DNA
agctgtacctgggttc

SEQ ID NO: 1261 - DNA, 16 bp, synthetic construct
  misc_feature 1..16: note = Synthetic oligonucleotide
  source 1..16: mol_type = other DNA
cctagaggaaccacta

SEQ ID NO: 1262 - DNA, 16 bp, synthetic construct
  misc_feature 1..16: note = Synthetic oligonucleotide
  source 1..16: mol_type = other DNA
acatgaatttcaggca

SEQ ID NO: 1263 - DNA, 16 bp, synthetic construct
  misc_feature 1..16: note = Synthetic oligonucleotide
  source 1..16: mol_type = other DNA
tctcagccaggccaaa

SEQ ID NO: 1264 - DNA, 16 bp, synthetic construct
  misc_feature 1..16: note = Synthetic oligonucleotide
  source 1..16: mol_type = other DNA
ccctattatagccttt

SEQ ID NO: 1265 - DNA, 16 bp, synthetic construct
  misc_feature 1..16: note = Synthetic oligonucleotide
  source 1..16: mol_type = other DNA
ctccaccaggctgcct

SEQ ID NO: 1266 - DNA, 16 bp, synthetic construct
  misc_feature 1..16: note = Synthetic oligonucleotide
  source 1..16: mol_type = other DNA
cccgtcctcctcgggc

SEQ ID NO: 1267 - DNA, 16 bp, synthetic construct
  misc_feature 1..16: note = Synthetic oligonucleotide
  source 1..16: mol_type = other DNA
ccatcagacggccgtg

SEQ ID NO: 1268 - DNA, 16 bp, synthetic construct
  misc_feature 1..16: note = Synthetic oligonucleotide
  source 1..16: mol_type = other DNA
tgtcacacttgctggc

SEQ ID NO: 1269 - DNA, 16 bp, synthetic construct
  misc_feature 1..16: note = Synthetic oligonucleotide
  source 1..16: mol_type = other DNA
ggcatcccggccgctg

SEQ ID NO: 1270 - DNA, 16 bp, synthetic construct
  misc_feature 1..16: note = Synthetic oligonucleotide
  source 1..16: mol_type = other DNA
gcaggctgcgcatgct

SEQ ID NO: 1271 - DNA, 16 bp, synthetic construct
  misc_feature 1..16: note = Synthetic oligonucleotide
  source 1..16: mol_type = other DNA
tgcaagcagaagatag

SEQ ID NO: 1272 - DNA, 16 bp, synthetic construct
  misc_feature 1..16: note = Synthetic oligonucleotide
  source 1..16: mol_type = other DNA
caggaactgacctgac

SEQ ID NO: 1273 - DNA, 16 bp, synthetic construct
  misc_feature 1..16: note = Synthetic oligonucleotide
  source 1..16: mol_type = other DNA
tacagctgctagttat

SEQ ID NO: 1274 - DNA, 16 bp, synthetic construct
  misc_feature 1..16: note = Synthetic oligonucleotide
  source 1..16: mol_type = other DNA
gtgcaggccatggtct

SEQ ID NO: 1275 - DNA, 16 bp, synthetic construct
  misc_feature 1..16: note = Synthetic oligonucleotide
  source 1..16: mol_type = other DNA
atatacgaactcaggg

SEQ ID NO: 1276 - DNA, 16 bp, synthetic construct
  misc_feature 1..16: note = Synthetic oligonucleotide
  source 1..16: mol_type = other DNA
ggccttaagagaacag

SEQ ID NO: 1277 - DNA, 16 bp, synthetic construct
  misc_feature 1..16: note = Synthetic oligonucleotide
  source 1..16: mol_type = other DNA
gaccagctggcttttc

SEQ ID NO: 1278 - DNA, 16 bp, synthetic construct
  misc_feature 1..16: note = Synthetic oligonucleotide
  source 1..16: mol_type = other DNA
cccaaagagtattggg

SEQ ID NO: 1279 - DNA, 16 bp, synthetic construct
  misc_feature 1..16: note = Synthetic oligonucleotide
  source 1..16: mol_type = other DNA
aactattcggtgtatc

SEQ ID NO: 1280 - DNA, 16 bp, synthetic construct
  misc_feature 1..16: note = Synthetic oligonucleotide
  source 1..16: mol_type = other DNA
cccaactgtgatgacc

SEQ ID NO: 1281 - DNA, 16 bp, synthetic construct
  misc_feature 1..16: note = Synthetic oligonucleotide
  source 1..16: mol_type = other DNA
caaagcaggtgctgca

SEQ ID NO: 1282 - DNA, 16 bp, synthetic construct
  misc_feature 1..16: note = Synthetic oligonucleotide
  source 1..16: mol_type = other DNA
aggtaagacagcctcc

SEQ ID NO: 1283 - DNA, 16 bp, synthetic construct
  misc_feature 1..16: note = Synthetic oligonucleotide
  source 1..16: mol_type = other DNA
gatgacatctttggca

SEQ ID NO: 1284 - DNA, 16 bp, synthetic construct
  misc_feature 1..16: note = Synthetic oligonucleotide
  source 1..16: mol_type = other DNA
gaccatacagtcctgc

SEQ ID NO: 1285 - DNA, 16 bp, synthetic construct
  misc_feature 1..16: note = Synthetic oligonucleotide
  source 1..16: mol_type = other DNA
gagaaactggagcagc

SEQ ID NO: 1286 - DNA, 16 bp, synthetic construct
  misc_feature 1..16: note = Synthetic oligonucleotide
  source 1..16: mol_type = other DNA
tagcagatcgctgacc

SEQ ID NO: 1287 - DNA, 16 bp, synthetic construct
  misc_feature 1..16: note = Synthetic oligonucleotide
  source 1..16: mol_type = other DNA
actcaagcaccctcat

SEQ ID NO: 1288 - DNA, 16 bp, synthetic construct
  misc_feature 1..16: note = Synthetic oligonucleotide
  source 1..16: mol_type = other DNA
catgctggcctcagct

SEQ ID NO: 1289 - DNA, 16 bp, synthetic construct
  misc_feature 1..16: note = Synthetic oligonucleotide
  source 1..16: mol_type = other DNA
tggtggcagtggacac

SEQ ID NO: 1290 - DNA, 16 bp, synthetic construct
  misc_feature 1..16: note = Synthetic oligonucleotide
  source 1..16: mol_type = other DNA
aatgaggcaggtaata

SEQ ID NO: 1291 - DNA, 16 bp, synthetic construct
  misc_feature 1..16: note = Synthetic oligonucleotide
  source 1..16: mol_type = other DNA
cctcagggcaccatcc

SEQ ID NO: 1292 - DNA, 16 bp, synthetic construct
  misc_feature 1..16: note = Synthetic oligonucleotide
  source 1..16: mol_type = other DNA
gggaaaacaccatctt

SEQ ID NO: 1293 - DNA, 16 bp, synthetic construct
  misc_feature 1..16: note = Synthetic oligonucleotide
  source 1..16: mol_type = other DNA
agcatctacctggcaa

SEQ ID NO: 1294 - DNA, 16 bp, synthetic construct
  misc_feature 1..16: note = Synthetic oligonucleotide
  source 1..16: mol_type = other DNA
gtgtacccagggcaag

SEQ ID NO: 1295 - DNA, 16 bp, synthetic construct
  misc_feature 1..16: note = Synthetic oligonucleotide
  source 1..16: mol_type = other DNA
aagcacatgtctagcg

SEQ ID NO: 1296 - DNA, 16 bp, synthetic construct
  misc_feature 1..16: note = Synthetic oligonucleotide
  source 1..16: mol_type = other DNA
agtcagggtccagccc

SEQ ID NO: 1297 - DNA, 16 bp, synthetic construct
  misc_feature 1..16: note = Synthetic oligonucleotide
  source 1..16: mol_type = other DNA
cattttaaagctcagc

SEQ ID NO: 1298 - DNA, 16 bp, synthetic construct
  misc_feature 1..16: note = Synthetic oligonucleotide
  source 1..16: mol_type = other DNA
ctcaagggccaggcca

SEQ ID NO: 1299 - DNA, 16 bp, synthetic construct
  misc_feature 1..16: note = Synthetic oligonucleotide
  source 1..16: mol_type = other DNA
gcacccgagcacagct

SEQ ID NO: 1300 - DNA, 16 bp, synthetic construct
  misc_feature 1..16: note = Synthetic oligonucleotide
  source 1..16: mol_type = other DNA
gcccacggacatcggc

SEQ ID NO: 1301 - DNA, 16 bp, synthetic construct
  misc_feature 1..16: note = Synthetic oligonucleotide
  source 1..16: mol_type = other DNA
ctggcacggaacaaga

SEQ ID NO: 1302 - DNA, 16 bp, synthetic construct
  misc_feature 1..16: note = Synthetic oligonucleotide
  source 1..16: mol_type = other DNA
gatgagggccatcagc

SEQ ID NO: 1303 - DNA, 16 bp, synthetic construct
  misc_feature 1..16: note = Synthetic oligonucleotide
  source 1..16: mol_type = other DNA
ggctagatgccatcca

SEQ ID NO: 1304 - DNA, 16 bp, synthetic construct
  misc_feature 1..16: note = Synthetic oligonucleotide
  source 1..16: mol_type = other DNA
ccgcaggccacctttg

SEQ ID NO: 1305 - DNA, 16 bp, synthetic construct
  misc_feature 1..16: note = Synthetic oligonucleotide
  source 1..16: mol_type = other DNA
agacagtgcatgcacc

SEQ ID NO: 1306 - DNA, 16 bp, synthetic construct
  misc_feature 1..16: note = Synthetic oligonucleotide
  source 1..16: mol_type = other DNA
tctggttccaggtttc

SEQ ID NO: 1307 - DNA, 16 bp, synthetic construct
  misc_feature 1..16: note = Synthetic oligonucleotide
  source 1..16: mol_type = other DNA
ttcctgctgtgtgagc

SEQ ID NO: 1308 - DNA, 16 bp, synthetic construct
  misc_feature 1..16: note = Synthetic oligonucleotide
  source 1..16: mol_type = other DNA
aagaagaggcttggct

SEQ ID NO: 1309 - DNA, 16 bp, synthetic construct
  misc_feature 1..16: note = Synthetic oligonucleotide
  source 1..16: mol_type = other DNA
caccgagcttcctggt

SEQ ID NO: 1310 - DNA, 16 bp, synthetic construct
  misc_feature 1..16: note = Synthetic oligonucleotide
  source 1..16: mol_type = other DNA
gtgaatcaggcctggg

SEQ ID NO: 1311 - DNA, 16 bp, synthetic construct
  misc_feature 1..16: note = Synthetic oligonucleotide
  source 1..16: mol_type = other DNA
ggacagacccaaaaga

SEQ ID NO: 1312 - DNA, 16 bp, synthetic construct
  misc_feature 1..16: note = Synthetic oligonucleotide
  source 1..16: mol_type = other DNA
tgctacaaaacccaga

SEQ ID NO: 1313 - DNA, 16 bp, synthetic construct
  misc_feature 1..16: note = Synthetic oligonucleotide
  source 1..16: mol_type = other DNA
cccgagccagtctcac

SEQ ID NO: 1314 - DNA, 16 bp, synthetic construct
  misc_feature 1..16: note = Synthetic oligonucleotide
  source 1..16: mol_type = other DNA
cctggagctgacggtg

SEQ ID NO: 1315 - DNA, 16 bp, synthetic construct
  misc_feature 1..16: note = Synthetic oligonucleotide
  source 1..16: mol_type = other DNA
ggaacgcaaggctagc

SEQ ID NO: 1316 - DNA, 16 bp, synthetic construct
  misc_feature 1..16: note = Synthetic oligonucleotide
  source 1..16: mol_type = other DNA
ttccaaaccaaatcgg

SEQ ID NO: 1317 - DNA, 16 bp, synthetic construct
  misc_feature 1..16: note = Synthetic oligonucleotide
  source 1..16: mol_type = other DNA
ggacaaaactgcaagt

SEQ ID NO: 1318 - DNA, 16 bp, synthetic construct
  misc_feature 1..16: note = Synthetic oligonucleotide
  source 1..16: mol_type = other DNA
ttctaaattcgattcc

SEQ ID NO: 1319 - DNA, 16 bp, synthetic construct
  misc_feature 1..16: note = Synthetic oligonucleotide
  source 1..16: mol_type = other DNA
ttagaaaggcagtaat

SEQ ID NO: 1320 - DNA, 16 bp, synthetic construct
  misc_feature 1..16: note = Synthetic oligonucleotide
  source 1..16: mol_type = other DNA
caaggacggcaccaag

SEQ ID NO: 1321 - DNA, 16 bp, synthetic construct
  misc_feature 1..16: note = Synthetic oligonucleotide
  source 1..16: mol_type = other DNA
gaagggatgactaagt

SEQ ID NO: 1322 - DNA, 16 bp, synthetic construct
  misc_feature 1..16: note = Synthetic oligonucleotide
  source 1..16: mol_type = other DNA
aggaaaccgtggacct

SEQ ID NO: 1323 - DNA, 16 bp, synthetic construct
  misc_feature 1..16: note = Synthetic oligonucleotide
  source 1..16: mol_type = other DNA
cctacttacaaattac

SEQ ID NO: 1324 - DNA, 16 bp, synthetic construct
  misc_feature 1..16: note = Synthetic oligonucleotide
  source 1..16: mol_type = other DNA
gggcagtgcgctctga

SEQ ID NO: 1325 - DNA, 16 bp, synthetic construct
  misc_feature 1..16: note = Synthetic oligonucleotide
  source 1..16: mol_type = other DNA
ttggtgaggtatcccc

SEQ ID NO: 1326 - DNA, 16 bp, synthetic construct
  misc_feature 1..16: note = Synthetic oligonucleotide
  source 1..16: mol_type = other DNA
gaagacatgcaggatc

SEQ ID NO: 1327 - DNA, 16 bp, synthetic construct
  misc_feature 1..16: note = Synthetic oligonucleotide
  source 1..16: mol_type = other DNA
ggcagaccaatgggtt

SEQ ID NO: 1328 - DNA, 16 bp, synthetic construct
  misc_feature 1..16: note = Synthetic oligonucleotide
  source 1..16: mol_type = other DNA
taagatttgaagcact

SEQ ID NO: 1329 - DNA, 16 bp, synthetic construct
  misc_feature 1..16: note = Synthetic oligonucleotide
  source 1..16: mol_type = other DNA
ctgaactgtaagctca

SEQ ID NO: 1330 - DNA, 16 bp, synthetic construct
  misc_feature 1..16: note = Synthetic oligonucleotide
  source 1..16: mol_type = other DNA
ggcactagcaggagtt

SEQ ID NO: 1331 - DNA, 16 bp, synthetic construct
  misc_feature 1..16: note = Synthetic oligonucleotide
  source 1..16: mol_type = other DNA
atggattcagctcaga

SEQ ID NO: 1332 - DNA, 16 bp, synthetic construct
  misc_feature 1..16: note = Synthetic oligonucleotide
  source 1..16: mol_type = other DNA
tccaactagaaccctt

SEQ ID NO: 1333 - DNA, 16 bp, synthetic construct
  misc_feature 1..16: note = Synthetic oligonucleotide
  source 1..16: mol_type = other DNA
cactgaagaggtctca

SEQ ID NO: 1334 - DNA, 16 bp, synthetic construct
  misc_feature 1..16: note = Synthetic oligonucleotide
  source 1..16: mol_type = other DNA
aggaacctgaagatca

SEQ ID NO: 1335 - DNA, 16 bp, synthetic construct
  misc_feature 1..16: note = Synthetic oligonucleotide
  source 1..16: mol_type = other DNA
taataatgcccccgta

SEQ ID NO: 1336 - DNA, 16 bp, synthetic construct
  misc_feature 1..16: note = Synthetic oligonucleotide
  source 1..16: mol_type = other DNA
agttagcccaggtgag

SEQ ID NO: 1337 - DNA, 16 bp, synthetic construct
  misc_feature 1..16: note = Synthetic oligonucleotide
  source 1..16: mol_type = other DNA
cgccaccctagaggaa

SEQ ID NO: 1338 - DNA, 16 bp, synthetic construct
  misc_feature 1..16: note = Synthetic oligonucleotide
  source 1..16: mol_type = other DNA
agcaattcagtggctg

SEQ ID NO: 1339 - DNA, 16 bp, synthetic construct
  misc_feature 1..16: note = Synthetic oligonucleotide
  source 1..16: mol_type = other DNA
ctccagcgcaggtctc

SEQ ID NO: 1340 - DNA, 16 bp, synthetic construct
  misc_feature 1..16: note = Synthetic oligonucleotide
  source 1..16: mol_type = other DNA
gtgtaaaataaagccc

SEQ ID NO: 1341 - DNA, 16 bp, synthetic construct
  misc_feature 1..16: note = Synthetic oligonucleotide
  source 1..16: mol_type = other DNA
ggagatacacctccac

SEQ ID NO: 1342 - DNA, 16 bp, synthetic construct
  misc_feature 1..16: note = Synthetic oligonucleotide
  source 1..16: mol_type = other DNA
tcccgtcctcctcggg

SEQ ID NO: 1343 - DNA, 16 bp, synthetic construct
  misc_feature 1..16: note = Synthetic oligonucleotide
  source 1..16: mol_type = other DNA
ggacagtgacagctgg

SEQ ID NO: 1344 - DNA, 16 bp, synthetic construct
  misc_feature 1..16: note = Synthetic oligonucleotide
  source 1..16: mol_type = other DNA
ctgtcacacttgctgg

SEQ ID NO: 1345 - DNA, 16 bp, synthetic construct
  misc_feature 1..16: note = Synthetic oligonucleotide
  source 1..16: mol_type = other DNA
cacgccggcatcccgg

SEQ ID NO: 1346 - DNA, 16 bp, synthetic construct
  misc_feature 1..16: note = Synthetic oligonucleotide
  source 1..16: mol_type = other DNA
gcgcaggctgcgcatg

SEQ ID NO: 1347 - DNA, 16 bp, synthetic construct
  misc_feature 1..16: note = Synthetic oligonucleotide
  source 1..16: mol_type = other DNA
atgcaagtgagtgagt

SEQ ID NO: 1348 - DNA, 16 bp, synthetic construct
  misc_feature 1..16: note = Synthetic oligonucleotide
  source 1..16: mol_type = other DNA
ggaaagaacagcctcc

SEQ ID NO: 1349 - DNA, 16 bp, synthetic construct
  misc_feature 1..16: note = Synthetic oligonucleotide
  source 1..16: mol_type = other DNA
gatacagacacccacc

SEQ ID NO: 1350 - DNA, 16 bp, synthetic construct
  misc_feature 1..16: note = Synthetic oligonucleotide
  source 1..16: mol_type = other DNA
taccataactccccac

SEQ ID NO: 1351 - DNA, 16 bp, synthetic construct
  misc_feature 1..16: note = Synthetic oligonucleotide
  source 1..16: mol_type = other DNA
atcaaactagccaacc

SEQ ID NO: 1352 - DNA, 16 bp, synthetic construct
  misc_feature 1..16: note = Synthetic oligonucleotide
  source 1..16: mol_type = other DNA
gaagacggagtaaggc

SEQ ID NO: 1353 - DNA, 16 bp, synthetic construct
  misc_feature 1..16: note = Synthetic oligonucleotide
  source 1..16: mol_type = other DNA
ggctggaccagctggc

SEQ ID NO: 1354 - DNA, 16 bp, synthetic construct
  misc_feature 1..16: note = Synthetic oligonucleotide
  source 1..16: mol_type = other DNA
ggcccaaagagtattg

SEQ ID NO: 1355 - DNA, 16 bp, synthetic construct
  misc_feature 1..16: note = Synthetic oligonucleotide
  source 1..16: mol_type = other DNA
gaaactattcggtgta

SEQ ID NO: 1356 - DNA, 16 bp, synthetic construct
  misc_feature 1..16: note = Synthetic oligonucleotide
  source 1..16: mol_type = other DNA
ggcattggtggcccca

SEQ ID NO: 1357 - DNA, 16 bp, synthetic construct
  misc_feature 1..16: note = Synthetic oligonucleotide
  source 1..16: mol_type = other DNA
tgtgacacaaagcagg

SEQ ID NO: 1358 - DNA, 16 bp, synthetic construct
  misc_feature 1..16: note = Synthetic oligonucleotide
  source 1..16: mol_type = other DNA
cgaaggtaagccgcct

SEQ ID NO: 1359 - DNA, 16 bp, synthetic construct
  misc_feature 1..16: note = Synthetic oligonucleotide
  source 1..16: mol_type = other DNA
cctcattgatgacatc

SEQ ID NO: 1360 - DNA, 16 bp, synthetic construct
  misc_feature 1..16: note = Synthetic oligonucleotide
  source 1..16: mol_type = other DNA
tgaccatacagtcctg

SEQ ID NO: 1361 - DNA, 16 bp, synthetic construct
  misc_feature 1..16: note = Synthetic oligonucleotide
  source 1..16: mol_type = other DNA
gctcgccccgccgctt

SEQ ID NO: 1362 - DNA, 16 bp, synthetic construct
  misc_feature 1..16: note = Synthetic oligonucleotide
  source 1..16: mol_type = other DNA
ggctgagtccagagta

SEQ ID NO: 1363 - DNA, 16 bp, synthetic construct
  misc_feature 1..16: note = Synthetic oligonucleotide
  source 1..16: mol_type = other DNA
gaaatgggaatctgct

SEQ ID NO: 1364 - DNA, 16 bp, synthetic construct
  misc_feature 1..16: note = Synthetic oligonucleotide
  source 1..16: mol_type = other DNA
ccatgctggcctcagc

SEQ ID NO: 1365 - DNA, 16 bp, synthetic construct
  misc_feature 1..16: note = Synthetic oligonucleotide
  source 1..16: mol_type = other DNA
cagctatagagcggca

SEQ ID NO: 1366 - DNA, 16 bp, synthetic construct
  misc_feature 1..16: note = Synthetic oligonucleotide
  source 1..16: mol_type = other DNA
gaacagctcagcctca

SEQ ID NO: 1367 - DNA, 16 bp, synthetic construct
  misc_feature 1..16: note = Synthetic oligonucleotide
  source 1..16: mol_type = other DNA
agccttagtttctcag

SEQ ID NO: 1368 - DNA, 16 bp, synthetic construct
  misc_feature 1..16: note = Synthetic oligonucleotide
  source 1..16: mol_type = other DNA
tcccagtgggagctgc

SEQ ID NO: 1369 - DNA, 16 bp, synthetic construct
  misc_feature 1..16: note = Synthetic oligonucleotide
  source 1..16: mol_type = other DNA
ccacagcatctacctg

SEQ ID NO: 1370 - DNA, 16 bp, synthetic construct
  misc_feature 1..16: note = Synthetic oligonucleotide
  source 1..16: mol_type = other DNA
ccaggaagagcacctg

SEQ ID NO: 1371 - DNA, 16 bp, synthetic construct
  misc_feature 1..16: note = Synthetic oligonucleotide
  source 1..16: mol_type = other DNA
agaaagcacatgtcta

SEQ ID NO: 1372 - DNA, 16 bp, synthetic construct
  misc_feature 1..16: note = Synthetic oligonucleotide
  source 1..16: mol_type = other DNA
agccagtcagggtcca

SEQ ID NO: 1373 - DNA, 16 bp, synthetic construct
  misc_feature 1..16: note = Synthetic oligonucleotide
  source 1..16: mol_type = other DNA
aaccattttaaagctc

SEQ ID NO: 1374 - DNA, 16 bp, synthetic construct
  misc_feature 1..16: note = Synthetic oligonucleotide
  source 1..16: mol_type = other DNA
cactcaagggccaggc

SEQ ID NO: 1375 - DNA, 16 bp, synthetic construct
  misc_feature 1..16: note = Synthetic oligonucleotide
  source 1..16: mol_type = other DNA
agcacccgagcacagc

SEQ ID NO: 1376 - DNA, 16 bp, synthetic construct
  misc_feature 1..16: note = Synthetic oligonucleotide
  source 1..16: mol_type = other DNA
agtcattctgcccacg

SEQ ID NO: 1377 - DNA, 16 bp, synthetic construct
  misc_feature 1..16: note = Synthetic oligonucleotide
  source 1..16: mol_type = other DNA
cctggcacggaacaag

SEQ ID NO: 1378 - DNA, 16 bp, synthetic construct
  misc_feature 1..16: note = Synthetic oligonucleotide
  source 1..16: mol_type = other DNA
gagatgagggccatca

SEQ ID NO: 1379 - DNA, 16 bp, synthetic construct
  misc_feature 1..16: note = Synthetic oligonucleotide
  source 1..16: mol_type = other DNA
gcgcacctgtctccag

SEQ ID NO: 1380 - DNA, 16 bp, synthetic construct
  misc_feature 1..16: note = Synthetic oligonucleotide
  source 1..16: mol_type = other DNA
tcctaggtgatggctc

SEQ ID NO: 1381 - DNA, 16 bp, synthetic construct
  misc_feature 1..16: note = Synthetic oligonucleotide
  source 1..16: mol_type = other DNA
tgagacagtgcatgca

SEQ ID NO: 1382 - DNA, 16 bp, synthetic construct
  misc_feature 1..16: note = Synthetic oligonucleotide
  source 1..16: mol_type = other DNA
ctctggttccaggttt

SEQ ID NO: 1383 - DNA, 16 bp, synthetic construct
  misc_feature 1..16: note = Synthetic oligonucleotide
  source 1..16: mol_type = other DNA
gttcctgctgtgtgag

SEQ ID NO: 1384 - DNA, 16 bp, synthetic construct
  misc_feature 1..16: note = Synthetic oligonucleotide
  source 1..16: mol_type = other DNA
gtaagaagaggcttgg

SEQ ID NO: 1385 - DNA, 16 bp, synthetic construct
  misc_feature 1..16: note = Synthetic oligonucleotide
  source 1..16: mol_type = other DNA
tcaccgagcttcctgg

SEQ ID NO: 1386 - DNA, 16 bp, synthetic construct
  misc_feature 1..16: note = Synthetic oligonucleotide
  source 1..16: mol_type = other DNA
ggccagtgaatcaggc

SEQ ID NO: 1387 - DNA, 16 bp, synthetic construct
  misc_feature 1..16: note = Synthetic oligonucleotide
  source 1..16: mol_type = other DNA
agagaggacagaccca

SEQ ID NO: 1388 - DNA, 16 bp, synthetic construct
  misc_feature 1..16: note = Synthetic oligonucleotide
  source 1..16: mol_type = other DNA
aaatgctacaaaaccc

SEQ ID NO: 1389 - DNA, 16 bp, synthetic construct
  misc_feature 1..16: note = Synthetic oligonucleotide
  source 1..16: mol_type = other DNA
ggcaacttcaaggcca

SEQ ID NO: 1390 - DNA, 16 bp, synthetic construct
  misc_feature 1..16: note = Synthetic oligonucleotide
  source 1..16: mol_type = other DNA
cgctgctgcaacgacg

SEQ ID NO: 1391 - DNA, 16 bp, synthetic construct
  misc_feature 1..16: note = Synthetic oligonucleotide
  source 1..16: mol_type = other DNA
accaggaccgcctgga

SEQ ID NO: 1392 - DNA, 16 bp, synthetic construct
  misc_feature 1..16: note = Synthetic oligonucleotide
  source 1..16: mol_type = other DNA
cggaacgcaaggctag

SEQ ID NO: 1393 - DNA, 16 bp, synthetic construct
  misc_feature 1..16: note = Synthetic oligonucleotide
  source 1..16: mol_type = other DNA
gtcataaagaaattgc

SEQ ID NO: 1394 - DNA, 16 bp, synthetic construct
  misc_feature 1..16: note = Synthetic oligonucleotide
  source 1..16: mol_type = other DNA
tggcagaattttcccc

SEQ ID NO: 1395 - DNA, 16 bp, synthetic construct
  misc_feature 1..16: note = Synthetic oligonucleotide
  source 1..16: mol_type = other DNA
tttcattctaaattcg

SEQ ID NO: 1396 - DNA, 16 bp, synthetic construct
  misc_feature 1..16: note = Synthetic oligonucleotide
  source 1..16: mol_type = other DNA
ctttacccaaagcctt

SEQ ID NO: 1397 - DNA, 16 bp, synthetic construct
  misc_feature 1..16: note = Synthetic oligonucleotide
  source 1..16: mol_type = other DNA
catagcgggagaactt

SEQ ID NO: 1398 - DNA, 16 bp, synthetic construct
  misc_feature 1..16: note = Synthetic oligonucleotide
  source 1..16: mol_type = other DNA
gcagaagggatgacta

SEQ ID NO: 1399 - DNA, 16 bp, synthetic construct
  misc_feature 1..16: note = Synthetic oligonucleotide
  source 1..16: mol_type = other DNA
agccaggaaaccgtgg

SEQ ID NO: 1400 - DNA, 16 bp, synthetic construct
  misc_feature 1..16: note = Synthetic oligonucleotide
  source 1..16: mol_type = other DNA
ccctacttacaaatta

SEQ ID NO: 1401 - DNA, 16 bp, synthetic construct
  misc_feature 1..16: note = Synthetic oligonucleotide
  source 1..16: mol_type = other DNA
aggcggcgggcagtgc

SEQ ID NO: 1402 - DNA, 16 bp, synthetic construct
  misc_feature 1..16: note = Synthetic oligonucleotide
  source 1..16: mol_type = other DNA
cttggtgaggtatccc

SEQ ID NO: 1403 - DNA, 16 bp, synthetic construct
  misc_feature 1..16: note = Synthetic oligonucleotide
  source 1..16: mol_type = other DNA
ggaagacatgcaggat

SEQ ID NO: 1404 - DNA, 16 bp, synthetic construct
  misc_feature 1..16: note = Synthetic oligonucleotide
  source 1..16: mol_type = other DNA
aggcagaccaatgggt

SEQ ID NO: 1405 - DNA, 16 bp, synthetic construct
  misc_feature 1..16: note = Synthetic oligonucleotide
  source 1..16: mol_type = other DNA
ctagaaggtggtgcag

SEQ ID NO: 1406 - DNA, 16 bp, synthetic construct
  misc_feature 1..16: note = Synthetic oligonucleotide
  source 1..16: mol_type = other DNA
ccatagtcaactgtac

SEQ ID NO: 1407 - DNA, 16 bp, synthetic construct
  misc_feature 1..16: note = Synthetic oligonucleotide
  source 1..16: mol_type = other DNA
agccaatgggaggcac

SEQ ID NO: 1408 - DNA, 16 bp, synthetic construct
  misc_feature 1..16: note = Synthetic oligonucleotide
  source 1..16: mol_type = other DNA
gggcaacttcaaggcc

SEQ ID NO: 1409 - DNA, 16 bp, synthetic construct
  misc_feature 1..16: note = Synthetic oligonucleotide
  source 1..16: mol_type = other DNA
gggcagagcaaatgga

SEQ ID NO: 1410 - DNA, 16 bp, synthetic construct
  misc_feature 1..16: note = Synthetic oligonucleotide
  source 1..16: mol_type = other DNA
gttcaccccaagctct

SEQ ID NO: 1411 - DNA, 16 bp, synthetic construct
  misc_feature 1..16: note = Synthetic oligonucleotide
  source 1..16: mol_type = other DNA
ctccactgaagaggtc

SEQ ID NO: 1412 - DNA, 16 bp, synthetic construct
  misc_feature 1..16: note = Synthetic oligonucleotide
  source 1..16: mol_type = other DNA
gatttaaccctccaaa

SEQ ID NO: 1413 - DNA, 16 bp, synthetic construct
  misc_feature 1..16: note = Synthetic oligonucleotide
  source 1..16: mol_type = other DNA
gttaataatgcccccg

SEQ ID NO: 1414 - DNA, 16 bp, synthetic construct
  misc_feature 1..16: note = Synthetic oligonucleotide
  source 1..16: mol_type = other DNA
gctgagttagcccagg

SEQ ID NO: 1415 - DNA, 16 bp, synthetic construct
  misc_feature 1..16: note = Synthetic oligonucleotide
  source 1..16: mol_type = other DNA
aaacagtgctcgccac

SEQ ID NO: 1416 - DNA, 16 bp, synthetic construct
  misc_feature 1..16: note = Synthetic oligonucleotide
  source 1..16: mol_type = other DNA
tacagagcaattcagt

SEQ ID NO: 1417 - DNA, 16 bp, synthetic construct
  misc_feature 1..16: note = Synthetic oligonucleotide
  source 1..16: mol_type = other DNA
tgccaggcaggtccag

SEQ ID NO: 1418 - DNA, 16 bp, synthetic construct
  misc_feature 1..16: note = Synthetic oligonucleotide
  source 1..16: mol_type = other DNA
caatatctaacaataa

SEQ ID NO: 1419 - DNA, 16 bp, synthetic construct
  misc_feature 1..16: note = Synthetic oligonucleotide
  source 1..16: mol_type = other DNA
gtctaggagatacacc

SEQ ID NO: 1420 - DNA, 16 bp, synthetic construct
  misc_feature 1..16: note = Synthetic oligonucleotide
  source 1..16: mol_type = other DNA
gtcccgtcctcctcgg

SEQ ID NO: 1421 - DNA, 16 bp, synthetic construct
  misc_feature 1..16: note = Synthetic oligonucleotide
  source 1..16: mol_type = other DNA
aatcagcaggtggctg

SEQ ID NO: 1422 - DNA, 16 bp, synthetic construct
  misc_feature 1..16: note = Synthetic oligonucleotide
  source 1..16: mol_type = other DNA
actgtcacacttgctg

SEQ ID NO: 1423 - DNA, 16 bp, synthetic construct
  misc_feature 1..16: note = Synthetic oligonucleotide
  source 1..16: mol_type = other DNA
gccacgccggcatccc

SEQ ID NO: 1424 - DNA, 16 bp, synthetic construct
  misc_feature 1..16: note = Synthetic oligonucleotide
  source 1..16: mol_type = other DNA
agcacgcgcaggctgc

SEQ ID NO: 1425 - DNA, 16 bp, synthetic construct
  misc_feature 1..16: note = Synthetic oligonucleotide
  source 1..16: mol_type = other DNA
ccacatctgcctggcc

SEQ ID NO: 1426 - DNA, 16 bp, synthetic construct
  misc_feature 1..16: note = Synthetic oligonucleotide
  source 1..16: mol_type = other DNA
tgccaggtcatgcaat

SEQ ID NO: 1427 - DNA, 16 bp, synthetic construct
  misc_feature 1..16: note = Synthetic oligonucleotide
  source 1..16: mol_type = other DNA
gggatacagacaccca

SEQ ID NO: 1428 - DNA, 16 bp, synthetic construct
  misc_feature 1..16: note = Synthetic oligonucleotide
  source 1..16: mol_type = other DNA
ccataccataactccc

SEQ ID NO: 1429 - DNA, 16 bp, synthetic construct
  misc_feature 1..16: note = Synthetic oligonucleotide
  source 1..16: mol_type = other DNA
caattacaccagcaat

SEQ ID NO: 1430 - DNA, 16 bp, synthetic construct
  misc_feature 1..16: note = Synthetic oligonucleotide
  source 1..16: mol_type = other DNA
ctgcgaaaatattttt

SEQ ID NO: 1431 - DNA, 16 bp, synthetic construct
  misc_feature 1..16: note = Synthetic oligonucleotide
  source 1..16: mol_type = other DNA
ccacaggctggaccag

SEQ ID NO: 1432 - DNA, 16 bp, synthetic construct
  misc_feature 1..16: note = Synthetic oligonucleotide
  source 1..16: mol_type = other DNA
cctcaaccgctcccat

SEQ ID NO: 1433 - DNA, 16 bp, synthetic construct
  misc_feature 1..16: note = Synthetic oligonucleotide
  source 1..16: mol_type = other DNA
gagataggaaactatt

SEQ ID NO: 1434 - DNA, 16 bp, synthetic construct
  misc_feature 1..16: note = Synthetic oligonucleotide
  source 1..16: mol_type = other DNA
ggtcaccggctggtct

SEQ ID NO: 1435 - DNA, 16 bp, synthetic construct
  misc_feature 1..16: note = Synthetic oligonucleotide
  source 1..16: mol_type = other DNA
tcccactctgtgacac

SEQ ID NO: 1436 - DNA, 16 bp, synthetic construct
  misc_feature 1..16: note = Synthetic oligonucleotide
  source 1..16: mol_type = other DNA
acagacactaagctct

SEQ ID NO: 1437 - DNA, 16 bp, synthetic construct
  misc_feature 1..16: note = Synthetic oligonucleotide
  source 1..16: mol_type = other DNA
ggcctcattgatgaca

SEQ ID NO: 1438 - DNA, 16 bp, synthetic construct
  misc_feature 1..16: note = Synthetic oligonucleotide
  source 1..16: mol_type = other DNA
ctgaccatacagtcct

SEQ ID NO: 1439 - DNA, 16 bp, synthetic construct
  misc_feature 1..16: note = Synthetic oligonucleotide
  source 1..16: mol_type = other DNA
ctccatgcgctcgccc

SEQ ID NO: 1440 - DNA, 16 bp, synthetic construct
  misc_feature 1..16: note = Synthetic oligonucleotide
  source 1..16: mol_type = other DNA
ctagagatggctgagt

SEQ ID NO: 1441 - DNA, 16 bp, synthetic construct
  misc_feature 1..16: note = Synthetic oligonucleotide
  source 1..16: mol_type = other DNA
acggaaatgggaatct

SEQ ID NO: 1442 - DNA, 16 bp, synthetic construct
  misc_feature 1..16: note = Synthetic oligonucleotide
  source 1..16: mol_type = other DNA
gtccccatgctggcct

SEQ ID NO: 1443 - DNA, 16 bp, synthetic construct
  misc_feature 1..16: note = Synthetic oligonucleotide
  source 1..16: mol_type = other DNA
atacagagatgttaag

SEQ ID NO: 1444 - DNA, 16 bp, synthetic construct
  misc_feature 1..16: note = Synthetic oligonucleotide
  source 1..16: mol_type = other DNA
tcttattccaggctgg

SEQ ID NO: 1445 - DNA, 16 bp, synthetic construct
  misc_feature 1..16: note = Synthetic oligonucleotide
  source 1..16: mol_type = other DNA
agctgaccagctgtgt

SEQ ID NO: 1446 - DNA, 16 bp, synthetic construct
  misc_feature 1..16: note = Synthetic oligonucleotide
  source 1..16: mol_type = other DNA
tgccaaggtcctccac

SEQ ID NO: 1447 - DNA, 16 bp, synthetic construct
  misc_feature 1..16: note = Synthetic oligonucleotide
  source 1..16: mol_type = other DNA
caaaaacagacccagc

SEQ ID NO: 1448 - DNA, 16 bp, synthetic construct
  misc_feature 1..16: note = Synthetic oligonucleotide
  source 1..16: mol_type = other DNA
aaatagatgctccagg

SEQ ID NO: 1449 - DNA, 16 bp, synthetic construct
  misc_feature 1..16: note = Synthetic oligonucleotide
  source 1..16: mol_type = other DNA
cgaggaaaagaaagca

SEQ ID NO: 1450 - DNA, 16 bp, synthetic construct
  misc_feature 1..16: note = Synthetic oligonucleotide
  source 1..16: mol_type = other DNA
ctgcagccagtcaggg

SEQ ID NO: 1451 - DNA, 16 bp, synthetic construct
  misc_feature 1..16: note = Synthetic oligonucleotide
  source 1..16: mol_type = other DNA
tcggaaccattttaaa

SEQ ID NO: 1452 - DNA, 16 bp, synthetic construct
  misc_feature 1..16: note = Synthetic oligonucleotide
  source 1..16: mol_type = other DNA
ccccactcaagggcca

SEQ ID NO: 1453 - DNA, 16 bp, synthetic construct
  misc_feature 1..16: note = Synthetic oligonucleotide
  source 1..16: mol_type = other DNA
cagcacccgagcacag

SEQ ID NO: 1454 - DNA, 16 bp, synthetic construct
  misc_feature 1..16: note = Synthetic oligonucleotide
  source 1..16: mol_type = other DNA
aaaagtcattctgccc

SEQ ID NO: 1455 - DNA, 16 bp, synthetic construct
  misc_feature 1..16: note = Synthetic oligonucleotide
  source 1..16: mol_type = other DNA
gcctggcacggaacaa

SEQ ID NO: 1456 - DNA, 16 bp, synthetic construct
  misc_feature 1..16: note = Synthetic oligonucleotide
  source 1..16: mol_type = other DNA
ctggagatgagggcca

SEQ ID NO: 1457 - DNA, 16 bp, synthetic construct
  misc_feature 1..16: note = Synthetic oligonucleotide
  source 1..16: mol_type = other DNA
gcacagcctgtgacca

SEQ ID NO: 1458 - DNA, 16 bp, synthetic construct
  misc_feature 1..16: note = Synthetic oligonucleotide
  source 1..16: mol_type = other DNA
gccgagtcagtcctag

SEQ ID NO: 1459 - DNA, 16 bp, synthetic construct
  misc_feature 1..16: note = Synthetic oligonucleotide
  source 1..16: mol_type = other DNA
gctgagacagtgcatg

SEQ ID NO: 1460 - DNA, 16 bp, synthetic construct
  misc_feature 1..16: note = Synthetic oligonucleotide
  source 1..16: mol_type = other DNA
cctctggttccaggtt

SEQ ID NO: 1461 - DNA, 16 bp, synthetic construct
  misc_feature 1..16: note = Synthetic oligonucleotide
  source 1..16: mol_type = other DNA
agttcctgctgtgtga

SEQ ID NO: 1462 - DNA, 16 bp, synthetic construct
  misc_feature 1..16: note = Synthetic oligonucleotide
  source 1..16: mol_type = other DNA
aagtaagaagaggctt

SEQ ID NO: 1463 - DNA, 16 bp, synthetic construct
  misc_feature 1..16: note = Synthetic oligonucleotide
  source 1..16: mol_type = other DNA
ctcaccgagcttcctg

SEQ ID NO: 1464 - DNA, 16 bp, synthetic construct
  misc_feature 1..16: note = Synthetic oligonucleotide
  source 1..16: mol_type = other DNA
cgccaggccagtgaat

SEQ ID NO: 1465 - DNA, 16 bp, synthetic construct
  misc_feature 1..16: note = Synthetic oligonucleotide
  source 1..16: mol_type = other DNA
acagagaggacagacc

SEQ ID NO: 1466 - DNA, 16 bp, synthetic construct
  misc_feature 1..16: note = Synthetic oligonucleotide
  source 1..16: mol_type = other DNA
agtcaccatattaata

SEQ ID NO: 1467 - DNA, 16 bp, synthetic construct
  misc_feature 1..16: note = Synthetic oligonucleotide
  source 1..16: mol_type = other DNA
tgcaatgccagccacg

SEQ ID NO: 1468 - DNA, 16 bp, synthetic construct
  misc_feature 1..16: note = Synthetic oligonucleotide
  source 1..16: mol_type = other DNA
agccgctgctgcaacg

SEQ ID NO: 1469 - DNA, 16 bp, synthetic construct
  misc_feature 1..16: note = Synthetic oligonucleotide
  source 1..16: mol_type = other DNA
gccaccaggaccgcct

SEQ ID NO: 1470 - DNA, 16 bp, synthetic construct
  misc_feature 1..16: note = Synthetic oligonucleotide
  source 1..16: mol_type = other DNA
cctcggaacgcaaggc

SEQ ID NO: 1471 - DNA, 16 bp, synthetic construct
  misc_feature 1..16: note = Synthetic oligonucleotide
  source 1..16: mol_type = other DNA
agcatgagttctgtgt

SEQ ID NO: 1472 - DNA, 16 bp, synthetic construct
  misc_feature 1..16: note = Synthetic oligonucleotide
  source 1..16: mol_type = other DNA
cagcacactcagacag

SEQ ID NO: 1473 - DNA, 16 bp, synthetic construct
  misc_feature 1..16: note = Synthetic oligonucleotide
  source 1..16: mol_type = other DNA
aaaaggattggtctaa

SEQ ID NO: 1474 - DNA, 16 bp, synthetic construct
  misc_feature 1..16: note = Synthetic oligonucleotide
  source 1..16: mol_type = other DNA
ccctttacccaaagcc

SEQ ID NO: 1475 - DNA, 16 bp, synthetic construct
  misc_feature 1..16: note = Synthetic oligonucleotide
  source 1..16: mol_type = other DNA
aatcagccttcaaggg

SEQ ID NO: 1476 - DNA, 16 bp, synthetic construct
  misc_feature 1..16: note = Synthetic oligonucleotide
  source 1..16: mol_type = other DNA
ggcagaagggatgact

SEQ ID NO: 1477 - DNA, 16 bp, synthetic construct
  misc_feature 1..16: note = Synthetic oligonucleotide
  source 1..16: mol_type = other DNA
tcgacaacaggttttc

SEQ ID NO: 1478 - DNA, 16 bp, synthetic construct
  misc_feature 1..16: note = Synthetic oligonucleotide
  source 1..16: mol_type = other DNA
tgacatggaagaaacc

SEQ ID NO: 1479 - DNA, 16 bp, synthetic construct
  misc_feature 1..16: note = Synthetic oligonucleotide
  source 1..16: mol_type = other DNA
gcaggcggcgggcagt

SEQ ID NO: 1480 - DNA, 16 bp, synthetic construct
  misc_feature 1..16: note = Synthetic oligonucleotide
  source 1..16: mol_type = other DNA
tcttggtgaggtatcc

SEQ ID NO: 1481 - DNA, 16 bp, synthetic construct
  misc_feature 1..16: note = Synthetic oligonucleotide
  source 1..16: mol_type = other DNA
tggaagacatgcagga

SEQ ID NO: 1482 - DNA, 16 bp, synthetic construct
  misc_feature 1..16: note = Synthetic oligonucleotide
  source 1..16: mol_type = other DNA
tgcattggcacaagaa

SEQ ID NO: 1483 - DNA, 16 bp, synthetic construct
  misc_feature 1..16: note = Synthetic oligonucleotide
  source 1..16: mol_type = other DNA
agttagaggccaggaa

SEQ ID NO: 1484 - DNA, 16 bp, synthetic construct
  misc_feature 1..16: note = Synthetic oligonucleotide
  source 1..16: mol_type = other DNA
tcccatagtcaactgt

SEQ ID NO: 1485 - DNA, 16 bp, synthetic construct
  misc_feature 1..16: note = Synthetic oligonucleotide
  source 1..16: mol_type = other DNA
ttgcaaagcttccagt

SEQ ID NO: 1486 - DNA, 16 bp, synthetic construct
  misc_feature 1..16: note = Synthetic oligonucleotide
  source 1..16: mol_type = other DNA
atgtagtcgacatggg

SEQ ID NO: 1487 - DNA, 16 bp, synthetic construct
  misc_feature 1..16: note = Synthetic oligonucleotide
  source 1..16: mol_type = other DNA
cgagaagtggaaacca

SEQ ID NO: 1488 - DNA, 16 bp, synthetic construct
  misc_feature 1..16: note = Synthetic oligonucleotide
  source 1..16: mol_type = other DNA
gtgaaagctgagttca

SEQ ID NO: 1489 - DNA, 16 bp, synthetic construct
  misc_feature 1..16: note = Synthetic oligonucleotide
  source 1..16: mol_type = other DNA
gggtggtaatttgtca

SEQ ID NO: 1490 - DNA, 16 bp, synthetic construct
  misc_feature 1..16: note = Synthetic oligonucleotide
  source 1..16: mol_type = other DNA
aataactgatttaacc

SEQ ID NO: 1491 - DNA, 16 bp, synthetic construct
  misc_feature 1..16: note = Synthetic oligonucleotide
  source 1..16: mol_type = other DNA
gttcattccactgctt

SEQ ID NO: 1492 - DNA, 16 bp, synthetic construct
  misc_feature 1..16: note = Synthetic oligonucleotide
  source 1..16: mol_type = other DNA
caacgcacatcgagca

SEQ ID NO: 1493 - DNA, 16 bp, synthetic construct
  misc_feature 1..16: note = Synthetic oligonucleotide
  source 1..16: mol_type = other DNA
accaaacagtgctcgc

SEQ ID NO: 1494 - DNA, 16 bp, synthetic construct
  misc_feature 1..16: note = Synthetic oligonucleotide
  source 1..16: mol_type = other DNA
aataaggtctggctca

SEQ ID NO: 1495 - DNA, 16 bp, synthetic construct
  misc_feature 1..16: note = Synthetic oligonucleotide
  source 1..16: mol_type = other DNA
acagatgccaggcagg

SEQ ID NO: 1496 - DNA, 16 bp, synthetic construct
  misc_feature 1..16: note = Synthetic oligonucleotide
  source 1..16: mol_type = other DNA
tcaatatctaacaata

SEQ ID NO: 1497 - DNA, 16 bp, synthetic construct
  misc_feature 1..16: note = Synthetic oligonucleotide
  source 1..16: mol_type = other DNA
ctgtatgctggtgtct

SEQ ID NO: 1498 - DNA, 16 bp, synthetic construct
  misc_feature 1..16: note = Synthetic oligonucleotide
  source 1..16: mol_type = other DNA
ggtcccgtcctcctcg

SEQ ID NO: 1499 - DNA, 16 bp, synthetic construct
  misc_feature 1..16: note = Synthetic oligonucleotide
  source 1..16: mol_type = other DNA
catgagaaagaccccc

SEQ ID NO: 1500 - DNA, 16 bp, synthetic construct
  misc_feature 1..16: note = Synthetic oligonucleotide
  source 1..16: mol_type = other DNA
tgactgtcacacttgc

SEQ ID NO: 1501 - DNA, 16 bp, synthetic construct
  misc_feature 1..16: note = Synthetic oligonucleotide
  source 1..16: mol_type = other DNA
ggccacgccggcatcc

SEQ ID NO: 1502 - DNA, 16 bp, synthetic construct
  misc_feature 1..16: note = Synthetic oligonucleotide
  source 1..16: mol_type = other DNA
gttgagcacgcgcagg

SEQ ID NO: 1503 - DNA, 16 bp, synthetic construct
  misc_feature 1..16: note = Synthetic oligonucleotide
  source 1..16: mol_type = other DNA
ctccaccacatctgcc

SEQ ID NO: 1504 - DNA, 16 bp, synthetic construct
  misc_feature 1..16: note = Synthetic oligonucleotide
  source 1..16: mol_type = other DNA
cgtgccaggtcatgca

SEQ ID NO: 1505 - DNA, 16 bp, synthetic construct
  misc_feature 1..16: note = Synthetic oligonucleotide
  source 1..16: mol_type = other DNA
tgggatacagacaccc

SEQ ID NO: 1506 - DNA, 16 bp, synthetic construct
  misc_feature 1..16: note = Synthetic oligonucleotide
  source 1..16: mol_type = other DNA
taaaagactccatgcc

SEQ ID NO: 1507 - DNA, 16 bp, synthetic construct
  misc_feature 1..16: note = Synthetic oligonucleotide
  source 1..16: mol_type = other DNA
gcaattacaccagcaa

SEQ ID NO: 1508 - DNA, 16 bp, synthetic construct
  misc_feature 1..16: note = Synthetic oligonucleotide
  source 1..16: mol_type = other DNA
gcacagagtgatggtt

SEQ ID NO: 1509 - DNA, 16 bp, synthetic construct
  misc_feature 1..16: note = Synthetic oligonucleotide
  source 1..16: mol_type = other DNA
ccccacaggctggacc

SEQ ID NO: 1510 - DNA, 16 bp, synthetic construct
  misc_feature 1..16: note = Synthetic oligonucleotide
  source 1..16: mol_type = other DNA
ctgcaccgggcatgcg

SEQ ID NO: 1511 - DNA, 16 bp, synthetic construct
  misc_feature 1..16: note = Synthetic oligonucleotide
  source 1..16: mol_type = other DNA
ccctaccatagccagg

SEQ ID NO: 1512 - DNA, 16 bp, synthetic construct
  misc_feature 1..16: note = Synthetic oligonucleotide
  source 1..16: mol_type = other DNA
ccccagggtcaccggc

SEQ ID NO: 1513 - DNA, 16 bp, synthetic construct
  misc_feature 1..16: note = Synthetic oligonucleotide
  source 1..16: mol_type = other DNA
gcacacagacactaag

SEQ ID NO: 1514 - DNA, 16 bp, synthetic construct
  misc_feature 1..16: note = Synthetic oligonucleotide
  source 1..16: mol_type = other DNA
aaccaggcctcattga

SEQ ID NO: 1515 - DNA, 16 bp, synthetic construct
  misc_feature 1..16: note = Synthetic oligonucleotide
  source 1..16: mol_type = other DNA
gctgaccatacagtcc

SEQ ID NO: 1516 - DNA, 16 bp, synthetic construct
  misc_feature 1..16: note = Synthetic oligonucleotide
  source 1..16: mol_type = other DNA
ctatcctgtagcatca

SEQ ID NO: 1517 - DNA, 16 bp, synthetic construct
  misc_feature 1..16: note = Synthetic oligonucleotide
  source 1..16: mol_type = other DNA
gacggaaatgggaatc

SEQ ID NO: 1518 - DNA, 16 bp, synthetic construct
  misc_feature 1..16: note = Synthetic oligonucleotide
  source 1..16: mol_type = other DNA
ggcagaccagcttgcc

SEQ ID NO: 1519 - DNA, 16 bp, synthetic construct
  misc_feature 1..16: note = Synthetic oligonucleotide
  source 1..16: mol_type = other DNA
ggtccccatgctggcc

SEQ ID NO: 1520 - DNA, 16 bp, synthetic construct
  misc_feature 1..16: note = Synthetic oligonucleotide
  source 1..16: mol_type = other DNA
tagcactcatcatttc

SEQ ID NO: 1521 - DNA, 16 bp, synthetic construct
  misc_feature 1..16: note = Synthetic oligonucleotide
  source 1..16: mol_type = other DNA
gacgagaatcaactct

SEQ ID NO: 1522 - DNA, 16 bp, synthetic construct
  misc_feature 1..16: note = Synthetic oligonucleotide
  source 1..16: mol_type = other DNA
caccaggactcctgtg

SEQ ID NO: 1523 - DNA, 16 bp, synthetic construct
  misc_feature 1..16: note = Synthetic oligonucleotide
  source 1..16: mol_type = other DNA
ggcttgtgggtgccaa

SEQ ID NO: 1524 - DNA, 16 bp, synthetic construct
  misc_feature 1..16: note = Synthetic oligonucleotide
  source 1..16: mol_type = other DNA
ctccaagtggagtggg

SEQ ID NO: 1525 - DNA, 16 bp, synthetic construct
  misc_feature 1..16: note = Synthetic oligonucleotide
  source 1..16: mol_type = other DNA
actaaaatagatgctc

SEQ ID NO: 1526 - DNA, 16 bp, synthetic construct
  misc_feature 1..16: note = Synthetic oligonucleotide
  source 1..16: mol_type = other DNA
tgccagagcccgagga

SEQ ID NO: 1527 - DNA, 16 bp, synthetic construct
  misc_feature 1..16: note = Synthetic oligonucleotide
  source 1..16: mol_type = other DNA
gggcactgcagccagt

SEQ ID NO: 1528 - DNA, 16 bp, synthetic construct
  misc_feature 1..16: note = Synthetic oligonucleotide
  source 1..16: mol_type = other DNA
gacaagtcggaaccat

SEQ ID NO: 1529 - DNA, 16 bp, synthetic construct
  misc_feature 1..16: note = Synthetic oligonucleotide
  source 1..16: mol_type = other DNA
ggcaaggaggctgccc

SEQ ID NO: 1530 - DNA, 16 bp, synthetic construct
  misc_feature 1..16: note = Synthetic oligonucleotide
  source 1..16: mol_type = other DNA
gcagcacccgagcaca

SEQ ID NO: 1531 - DNA, 16 bp, synthetic construct
  misc_feature 1..16: note = Synthetic oligonucleotide
  source 1..16: mol_type = other DNA
taaaagtcattctgcc

SEQ ID NO: 1532 - DNA, 16 bp, synthetic construct
  misc_feature 1..16: note = Synthetic oligonucleotide
  source 1..16: mol_type = other DNA
tgcctggcacggaaca

SEQ ID NO: 1533 - DNA, 16 bp, synthetic construct
  misc_feature 1..16: note = Synthetic oligonucleotide
  source 1..16: mol_type = other DNA
agttagctggagatga

SEQ ID NO: 1534 - DNA, 16 bp, synthetic construct
  misc_feature 1..16: note = Synthetic oligonucleotide
  source 1..16: mol_type = other DNA
accaaggcacagcctg

SEQ ID NO: 1535 - DNA, 16 bp, synthetic construct
  misc_feature 1..16: note = Synthetic oligonucleotide
  source 1..16: mol_type = other DNA
tgccgagtcagtccta

SEQ ID NO: 1536 - DNA, 16 bp, synthetic construct
  misc_feature 1..16: note = Synthetic oligonucleotide
  source 1..16: mol_type = other DNA
gtggagcgggttggct

SEQ ID NO: 1537 - DNA, 16 bp, synthetic construct
  misc_feature 1..16: note = Synthetic oligonucleotide
  source 1..16: mol_type = other DNA
ccctctggttccaggt

SEQ ID NO: 1538 - DNA, 16 bp, synthetic construct
  misc_feature 1..16: note = Synthetic oligonucleotide
  source 1..16: mol_type = other DNA
tcagttcctgctgtgt

SEQ ID NO: 1539 - DNA, 16 bp, synthetic construct
  misc_feature 1..16: note = Synthetic oligonucleotide
  source 1..16: mol_type = other DNA
gtgaagtaagaagagg

SEQ ID NO: 1540 - DNA, 16 bp, synthetic construct
  misc_feature 1..16: note = Synthetic oligonucleotide
  source 1..16: mol_type = other DNA
actcaccgagcttcct

SEQ ID NO: 1541 - DNA, 16 bp, synthetic construct
  misc_feature 1..16: note = Synthetic oligonucleotide
  source 1..16: mol_type = other DNA
ttagaagcatctccgc

SEQ ID NO: 1542 - DNA, 16 bp, synthetic construct
  misc_feature 1..16: note = Synthetic oligonucleotide
  source 1..16: mol_type = other DNA
ggcaacagagaggaca

SEQ ID NO: 1543 - DNA, 16 bp, synthetic construct
  misc_feature 1..16: note = Synthetic oligonucleotide
  source 1..16: mol_type = other DNA
taaaaagtcaccatat

SEQ ID NO: 1544 - DNA, 27001 bp, Macaca fascicularis
  source 1..27001: mol_type = other DNA
cattgcaaatacaattccagttacaggcaacaggaaggaaaaccacctctgtcagcaaacaatgagctcccactctgtgctgcgatggtggctcaatgcggatagctctgaccttacctcatggagtcactgtcaacccactggttgcacagtctttgtgccctggctctctggagtgaggtctttgcaaacaaagtgggaaatgcagcaactttggactccagcacctagattccgagcaggtcatttcactcagaatatgctgtgcatctgcaatgacggatcataaagccgcctttgtttcttcccagtattgacagcccttccagaaagagcaagcctcatggcatgccacatgtacaatctgaggccaggagctctctttccccttttcatcctcctgcctagtacacaataggtgtttactggatgcttgtccagttgagttcttgaacatggtgtgtaaaaggaatctttgcaaattgaatcttctggaacgctgagcttgtgcctaccatagaattctgaacgtacctatatgacatctttgcaaacttaaaacctgaatctttgcagtataaatcccttgaaacgcatggaggctgggcatcaaaagcaagcagtatcttcaaggaacagctagtcggtaaggtcagtgtgcagggtgcataaagagcagaggccggcgggggtccaagataagtttagaaggttgccaggttaaggtcggtggaaagaattcggtgggcagggaggagtccatagtaggattgattcagaagtctcactggtcagcaggtgacaaggtggacccaggaaacactgaaaaggtgggctgggcagaactcggagtctggcatcccacgcagggtgagaggcgggagaggaggtgcctctagagcgccgacccgccttccagcccagttagaatttgggagttttttcttccctctgcacgtaatctgacgctgtttggggagggcgaggccgaaacctgatcctccagtccgggggttccgttaatgtttaatcagataggatcgtccgatggggctctggtggcgtgatctgcgggccccaggcgtcaagcacccacaccctagaaggtttccgcagcggcgtcgaggcgctcgtggttgcaggagggcgccgccgctcagttcagggtccgagcctggaggagtgagccaggcagtgagactgtctcaggcgggccgggacgtgtcgttgcagcggcggctcccagctcccagccaggattccgcgcgccccttcgcgcgccctgagcctgaactccagctcctgcacagtcctccccaccgtaaggctcaaggcgccgcccgcgtggaccgtgcacggcctctaggtctcctcatcaggacggcaacctctcccctggccctgatgggtaccgtcagctccaggcggtcctggtggcctctgccgctgccactgctgctgctcctgctcctgggtcccgctggcgcccgtgcgcaggaggacgaggacggcgactacgaggagctggtgctagccttgcgttccgaggaggacggcctggccgacgcacccgagcacggagccacagccaccttccaccgctgcgccaaggtgcgggcggaggggtggcaggcctgggggaacccgcagccgggacggtgcgatgctgtttcctctcgggtctcagtttccccccatttaagagaggaagtggggtgcaggtctccgagggctcttcgcttggcacgatcttggggactgcaggcaaggcggcgtgggaggacgggtcgtggggagcgcggtggagagcggggacggccggcctttcggggacttgcgggggcgtgcggctgcgctattcagtgggaaggctcgcggggttgggagactgcgaggctgagggagggcgggcagagcactgccagggtctcctgcccagatttcagactttccgcctcgccgcggcacaggtgggtgaagaagtgaatgcctggaaagcactgggaacgcaccagacacagaggaagtgggcttgccattatagtgggttccgattcggtttgggaaatatgggcagcggaggatggagggcctggagagaaggccctacccgagacaggagcggggtgggaaggactgcagatgctgggagcgcgaggcaatttctttacgacacagaacttatgctgtagtattccatctgtttcaattgaagaaaagaaccagctgaaggggcaggggagaaggggcggagttattctcgaggcccattggtgtcctttaggactcaggcagggaagggcccttggtgctctggagccggaggtggcgcgcctggtactgggaccccgcagttgagcccggcgcctcagcccacctggctgtctgccgaccgaccgagggtgaggcgagtttgctcaacgactctgccagcatctggccctcaggctgtgggaagcttcttcccggggcggggtcactagttttttctaagtattatcagcccaggacttggctgaggttctgtgtcccccagcttggagtcagatctggggttgaatgatggcttcctctcactagctgtggtgcttgacaagccacttatccttgagcctccattgcctagtctttaaaaaggaagtgacaatcctccctaagggctcagtggcagcagatggggagatgaagggaaagttctgttgaccatgagtgacctcactcatgcaagcccagggagggatcacttgcagttttgcccctgtctgcagcgtgacctgttggtgacattgtctttgctccaaactacagctcctggggcagaggggaaaattctgccactcacagctgcctgccccatctgagtgttctgggtggcaggatggcaggtccttactcagctcagtatagtcctcttccttgttccctgagcctttgactttctagagggatgttgtggggttgtggccaggataagaaaaggcacttcaagttaccactgctccaaaacgactgttctggaaatagtgagtaccccatcctgagaggtgagtaagcagaggctgtatgaccacctgaaccaagcccttgaggatgtttcttctctggtggaaatttggaacaggagcctcctcacgtttatttattcattcattcaatggatattctgtgggagtcgaatttagaatgaaaatattttttggcaagcagaaaagaatttttagaccaatccttttgttttagtcatgagaaactgaggctcagagagaggaggtcaccccaggtgcattagaactgggtttccagaactcacattccactgcacagagtactctcccaattcattcgatttttatttagcggaaggcatttttagatgaatctttgaagcattagtaggagttcagcgatgacgatgtcaggagaattttattctaggattaggaggtaccatgaacaaaggcacagagctgggaaaaccagaggtggaggataaggagcacatgtccacagttctttttctttttttgagatggagttttgctcttgttgcccaggctggggtgcaatggtgcagtctcagctcactgcaacctccacctcccaggttcaagtgattctcctgcctcagcctcccaagaagctgggattacaggcgcctgccaccacacccggctaatttttgtatttttagtagagacggggtttcaccatgctggtcaggctggtcttgaactcctgacctcctcagatccactgatttgtccgccttggtctcccaaagtgctggaattacagttgtgagccactgcgcccaggctccacagttctttatccaccttctgaaatgtaaaatgttctgaaaaccaaaaggtttttctgtgatttatttgatggtagcatctgacgtgaactgacatgagattatttttaatctagttgtgtgaatatgtgtattcatgtattttgctgcatagattacacatgcagctccagattcctccaagcaggctctctgattgcccactactgtctttctaaaatccaaacaagttctgaggttcaaaaccgatttggccctaaggctttgggtaaagggggtgaactctgttctactctgactggagtccaagatgcgtatatacagagatgtgggtggtgaggctgcaaaggtaggttgaggtaggggccaaggaggagcatggagtttggacttgatccatgaggctgtggggagccagtgaaggttcttgagcaggtgtgtctgcctgagagcagctggagcagacgagagctaaaaccaaacaaatcacctgcagatcgtggctgctatagtttgtcccctccaaatctcatgtggaaatgtggtccccggtgttggaagtggggcctaatgggaggtgtttgggtcgtgggggaggaacccccatgaaaggcttggtgccatccttgtgataatgactagattctccctctatgatttcccttgaaggctggttattaaaaagagcttggtacctccctctcttctctcttgcttcttctcttgccatgtgatagatctctgcacatgtaggctccccttcaccttctgccatcaggggaagcagcttaaggccctcaccagaagcagatgctggtgccatgcttcttggagagcttgcagagccatgagctgaataaatcccttttccttataaattacccaccttcaggtattcctttatatagcaacacaaaaggactaagacagtggccctgactcttctctctctttaagaagtgttgtctttgctcacttagtcatcccttccgcctgcatttgtagagcatctggatgggagatttctacaaccgtcactcttgaccttcccagcaggcctgtgtcatacgtactatggtctccacaatacagcggagatatctgaggcccagagaggttgagtgacttgctcatggccacacaaccagtaaatattagagctggaattcaggtccacggtttcctggctccaaagccatgagtttttccctcagtttattctgattggggcaggggggaggaggtggcctttgggcagggccgccacgggtaaccaggcccatagagagctggctgcaggtacagaggaaaacctcttgtcgagtgcggcccatggttcccatttttgcctgactggcacatttgaaagtgttatataactatgtgaataataatagttggcctatatgcgttttttaatttgcttttgggtccgcatttggtaacttctttatcacttactacactctgttgtgcctcttttgttgtaattctaatttgtaagtaggggtgagataaagtacacatagggtttgctgggtttcttccacgtcatcatgttcctccttgcacggggccaggatccgtggaggctgcccggcacctacgtggtggtgctgaaggaggagacccaccgctcgcagtcagagcgcactgcccgccgcctgcaggcccaagctgcccgccggggatacctcaccaagatcctgcatgtcttccatcaccttcttcctggcttcctggtgaagatgagtggcgacctgctggagctggtgagccaccctttctgggaatggcacttcctgatagggctgggccactgcatatacactggggactgtgctcagtaggcctattgctgaaaatcagaaggggacagcaagtatgtattgagcacttattgggtaccaagcacagtaaccactggctttctgtatggaattccctttaagcctggccatgccccagtggtatgtccatcttcatttgaaagttcagaggggaccacacagacagctaggggtaggacctggatcaaactcagtggtctgcctgccagccattcttatgccaatgcatctgctacctatggaaacctttagggacaaggccctgggatgttcaatggagcctgagtcattttataaaaaagcatgactcaagggtctacaatttctttgaggctgctgctatcagagtaaagaccctactttaggacagggtggccctcctccctcctggatgtcacatctttggtggagaggcagaaaggggactgggtattctcctcaccctggccctaatgcttcaaatcttaaaaaaaaaccttcttgtttttgcttctgccccaccttctagcccacctcttttcctggcctgtcacttgatgagagcgtgtgtcattttcacactgattctccacatggcagggggtgcttttcagcctcctgcagacagtgaggcccagggtcttgcccaaggtcacacagcatgtaatgggcagggtcagagtctggacttgggtctcctagctgcactgtactgctgctccacgggttaatcagctcagcatcccgtggctgaacagcgacctcataccaaggcctgtgggaccatgacagggattgatagggtccctgccttaggaacccgtagtctaagtagaggagactgacaagtcaatgccttccatcagtctgctcaacacacatttaccaagcgcctactgtgtgctgcagaggcgaagatgacacagcccaggcctttccctcgagcttacagttcagaaggagagactgatcagtgaccgccagccagtacagctgactatgggacaatgtgctcagcagtggggcgagacgaagaaggtacccgtatagcaccagatgacaggcacaagccccacaggccagggcagctgctcagaggagagtaggccaagcagaagccaagcggaaagctgcaggcatttgccattgagacctgggcttcaaactgggcatcctaccagcctgggtttgagtcccacccagccccttattagttgtttaaccctgggcaaatgccttcacctctctgagcctcattcccctatctgtaaaccagttataataatgggaacattcatttaaggactaaatgaggttgtgaagcattcagcagatgctaggtatagaaactcgccaaagtgggggcaggttaagaagcctctggggataccaaggcatccagggactagttgtggcaggaagctgttaccacttaggtctgaagggtaaggagagggaatagttttccctctgcccaattggagctggtggcatggaggagaggctgcccgtggggagtcacctgagagttcaccgctgccatgcgcagggagtcaggaggtagggagggagtggggcagatgcacagttttttgtttttgtttttgtttttgagattctgttgcccaggctggagtgcagtggtgccatgtcagctcactgcaacctctgcctcccgggttcaagcaattctcatgcctcagcctcctgagtagctgggactacaggtgtgtgccaccatgcccagctaatttttgtatttttaatagagatggagtttcaccatgttggccaggctggtctcgaactcttgacctcaggtgatcccccacctcggcctcccaaagtgctgggattacaggcatgagccaccgcgcccagctgcagatgcactcttgtccctctaactcctgctggtgcctcccattggctgagcctaaatggaggctttgcaagggagctggtgctgcagtttgcactgagcaggctggagaaggctggggaatagactgggggacaaaccgaattgccagtgctgttatgtcatgatttaggcatagtgtccagggcctgagcttcactccgtgtccatcctgcccagagccttagcacagcctggctcccagacaagatgtcaagtccagaatccttcctaaaaggaatcctttgtgctaggccttgttgcagggatatgggagtgctaggctcccagcctgatcaatgagtgagaaaactcaggctcctagtctgtcctccggggcaccaggagggagtctgccgggacaaggtgggaggctgctgggctgggatatggggacaggtgtgatcaggtgaggccaggctgtggctgtgtttgctgctgtccagatggcttaagcagaatcccccaacctctctggcttctgcaggccctgaagttgccccatgtcgactacatcgaggaggactcctctgtcttcgcccagagcatcccatggaacctggagcgaattactcctgcacggtaccgggcggatgaataccagccccccagtaagaccccccatctgtgcgctgccccttcacacctgagctgaatccatttgctctgctctggccttgcctccctgccagtggtttccacttcttggggggctttgggactcagcacctccactgacccctttttttctgtcccatccccaacccctgcagcccccactgcctgccttcctgtagctccacaaatgcaaaagtcttgccttaaatgatcctcttttcctccttgtctcttgttttcctcttctctccatttggaatggcccagcaggctgcacttaccttagaaggagggttcatctgatggtgactctacctagggcccctccccaggcctctataactcccagtgccctgcagactggaccagaccccttaatgggacagacacaacccggactgggatgcccctgcctagcttcctgttttgctgctctccctgcctccagctctgtttggctttctggatctccctgcatggcccactttgtgtcttccctctaggcctttccttccactgttccctctgcctggtgtggcctgactgtgggagggagggaggaggagtagccatggaaaacagtctgcattctagcagggccttgcaggtggcaattccttgcaggtggcaattcagtcagggaagactctagatgcacctggcctgaggagaggatgaagggttctagttggactgtgttaagtttgaggtgcccatggtgtgaggtctgcagctcagtgcagagacaatgcaatgtggtgggtccgtgcaacatggtgccaggacgcagagcttggggtgaactcagcttccaccccttaccggttctcgtggggtcttgggaagccacttcgttctattagtcttgtctttcttgtctgtaaaatgggcacataaccctgtccctgtccttctcacaggttgctgtgagactccagtgagttgaagggtgtgcagatgcttttggaagtgaaaagttgggggcttctgtgtgactttgcatactgtatgaccttgcatatgtctgagttgctgccattgcaacagatcagagctggtgggcaggaggtggagatagggtttgtgcgggggacatcctctggcaagggtggcagcagcagaagcgaggggcctggttggtcatgtgtgctgacctgacctgggcagcctgtggccagggagaggacagctcctctgtaggaggagcctgttcctttccaaccaggtgggacctcttctgtggattcctggagccccctgcactccacattggcgcctcagggacctcccggagcaggctaatatcagagactgagagggacactggcagagggtcacagaggccccagtccaggcagaagaccaagaagatcttgccccctaagttagtttcctagcactgctgtgacaaactaccacccccttgttggaacaaattgattctctgcagtactggaggccagaagcctgaatcagtgttggcaggaccacgttctccccgggagctccagggagaagcttctcttgtctcctctgtgtcccaacagcggcagcacacccatcccagcctctgtcttcacacagccttctctgtgtctctctcctcttcattgtctcataaggacactcgttgttggatttggggccaactggatcatccaggatgatctcatgtggagaaccgtaaccacatctgcaaggaccctttttccaaataaggtcacagccacaggcggtgcgggttaagatgtgagtgtaccctttggcagccaccattccctcctctcccttgggccagaagcagacgtggggccctttcctccccataggatgcccatggattgtccccctccccacttcccccgagtgtctgtgggaagtggcaggaatggcaggcaggggtgtggaaccccttctggagtcacatcaagggcttggctggaggatgtcctcctggagctgttgcgctggcatggggcaggctggctgggcccagcagcagcctcttcattcatggggaggccacaggcatgggccctggagctggctgccgccctcaaacccagactctgcactcttaactgtgtgaccctgcacacatcactcaccctctctgatcctcaggttcctaggttcctctgcaaaagcgagggaatagtaagcctcgctctggggggctgttaggagggttaaatgagttattgctatagcatgcatttctctgtcaggtattgagtgaggtgctgtgattttagccctgcatttttcttttcttaccattcaacaataacgtcttgagcacccactgtgtgccaggcaccgtattaggtgctggggatacaaaggtgaatgaaatggacgtggtctctttccccaacagtgtatccagaagattaatccattccttaaacaaatgctatcgacacaaattagttccggataggctgagagctctgaaggagtgcaggcaactgtgagcctgtgtatccggcagaaggatcaggaaaggcttcctggaggaagcgctgttccagccaagacccacgggggcattattaaccaggccaaggggacagtgtccaagcagaggaatgaacatggactgaagctgtgaggcaggagggagtgtagcctgtacagaagggactgaggctggtgagaccagcagggcctgggtgacctccagggcagatgtgaaaggaagaactcggccacagtctgagcttctcaggcgcatggcagggctgcctggtgagagctaatgagctccctgctctggaggtatgcacgcaggactgggctcccacctgccagaggccgcagagctttctgtaccaacctagaggctggaagaggccactccaaggcctctttgcccctgagagtggtggcttttcttgaggccaccttgccacactgtcacacggaactagcagcctctgcctcacccaggggtttggaggatagaggggggcctaggaagggccccagaggccctgtgtcctgtccgagctgaaaccctttccactggaaggaagcccaaggatgttcctgtgggggctttggcttgtgctttccctccagctgtagaggccatggtggggctgtgggccctgggtgggcgctccaggcttacagcctctctcctggcagtgtcttaccaagagctgccccttcgccaggcccgcctgccctctgctggccatgcttgcagcctcctgaccctgtcccagcaggagagtgcgctggtgtcagcgggcaggaactgcctgtatttagaagttgtggggctgcgctggggccacaccccaggcccagggatgtgacctcacagtggtcacatcatcttgcagcggaccccaagtacagctcctggagcagatggtggtcccaagcacaggtgggaccagaaaggattgtcacctgggctaactcagctgcggcctcagttccctcctcacacacgacgagcagcatggactggaatcctgcccagcaggcctttggcttgatgtgcgttgtgtggcttatgtccaggtggggaagcagcttctgtgctgtcttctagatgagcctgtatcccctgggctgtctgccaatgtatccagttgtaccgtcagcctggaagctctgagggagaaccttgggctgcttcctaagcacctgtatcccctgtagccagctcggggcctctgctaggagcagaccgagcatggcctatgggcctggcaccatctggcctctgcccaccttgctggccttgtcatgtgtctgcccctccgacattccatagcccagttcaatatctagtggttcctctagggtgaccagcaccctttggtctccacatgtcttcaggtcggagctcacagcgctctcaactaccccttcccagtgcagcaccgggcacgtggtagatgcctactgatgagtgaaagctcctaacacactcggagagcaaggactctgcctcatcccgcagcctgggaggacaggcagactgccgaggacctgcccagcatgctacagaagtaaccgaagtgcgcatgggcactgatcagtggagcgtcctgctgagactggaggccatagggcagggcgaatagtgtctgtgcaggctggggactcacagttcggactgggcccagccctactgccacagtgggtgggtgggaggacgtaggactgggagctgaccttgcctgaaattagtgtgggatctcagagcagccactgaattgctctgtagtgggctaaatagtggcccccacagatacacacacccagacagagcctgtgagccggaccttatttggagaaaaggtccttgtagatgtaattaagcatctcaagatgacatcatctggattatgcggtgggctgtaagtccggtgatgtgtctttatgagcgaaaggcggagggagatttgagacacacaggaggggccacttggagacagaggcagagattggagaaatgtgaccacaagccagggagcatcagcagctaccagaagccggaagacgtgaggcagggttctccctggagccttcgttgctgagtctgggaatttgttactgaagccataagaagcgacgacactccctgagcctcccgtacttgctcacctgtcctgagatgagaatctctactccgcagcatatttggaggatcactgccggggacacagaggtgctgttcagatagcacttcagaagactcaggagaccctggggcaggagcaggttgattgacagcccagagggctaccatctggttccacctgaggccctgcttctcctggctgcaggggttccagggccaggccatttccgctggcgcaggactcttctagcagcaacctgcctaagtcttcctttggcctggctgagagtttctgagacccgcactggagcggaggtgcttccttccttgcttcccttcttcctcccccccgtctccgcccagtgggctggacctgccttgcatctgtgagctctccctactttctcctacaccccaatctttgtcctgcacaggcaactccctcagtgagtctcttgcagcttttaccccagtgccggcttcttggagaatccaaactgatccaattaggtatagggtaggctctcggtgactgttttctctgaggccgtgactcgtgtgaggcggaagcagcccctgtgagcccttctggtagcttgtggagtgcagaatgcttggacctggagtcaggaggcccagacacacatcctgtccgagctgcagcttcctgtctctaaaatgagccgaccagcgcaggcggccagacatcactgttattctttgagtctttaaatcatgttgtctttctcgcagactcggtgagctgtgaaaagctataataggggctttattttacactatgatattatttcttgaacattcatattattgttggatattgatattaatatgaaggagcaggatgacttgggtccttcctggcagtagcattgccagctgatggccttggacagttatctgccccctctaggcctccctttccttgtctatgaaatatagaataggatctagcgtgcgaggatttttttggaggttcaatgagtgaatatatttaaggtgctttcaccagtgcctgggatgtactccacagtttctgtgtgttaactacaaggttgacttcatgctcattccctcctctcccacaaatgtcaccttggaaagaaggaggcagcctggtggaggtgtatctcctagacaccagcatacagagtgaccaccgggaaatcgagggcagggtcatggtcaccgacttcgagagtgtgcccgaggaggacgggacccgcttccacagacaggtaagcacggccctctggtgggagggctgcctctgcccatatccccatcctggaggtgggtggagactcccgtccaagagtgttgcagctgtactgctgggctacagtccccagctgtcactgtcccctccctgccatcagttgtgggaagggtgttcatccatccagccacttgctgatttgttatggggtgggggggtctttcttatgtggtccttgtgttggctgagcaggccagcaagtgtgacagccatggcacccacctggcaggggtggtcagcggccgggatgccggcgtggccaagggcgccggcctgcgtagcctgcgcgtgctcaactgccaagggaagggcacggtcagcggcaccctcataggtgagtgatggccccagacagcgctggtctctctccatctggacctggcctgggaagtggcttgggctgggcccagggagagctagtctcctaaccaagaatgctgtggcagcctctgccgcagagccagagaaccagagtgccaaagctggcagggtccccagtgaccacgagtgcagatgaagaaacccaggccccaagagggttacgcaggtagcccaaggagtgcagacttgaccctgggtcagtgacctttccacaattccacactgctccccttttcaaacctggtgacatctttgtgtcttttgtgatgttatcttcaatgtggagggactcgaggtgatctaagcaaacttcttctatcttctgcttgcatacttctgagaccagaggactcacttacttgcatgactggccctgcaggtcacactggccaggcagatgtggtggaggaactggcagaggactttttctagactatgactctgtttagtccatctggcggcccccctgtgaagtcccgctgagaactaggactccgggggcctgtggacagagaagagggagggtgctctcccttactgacttcctcctgtggccactgagcaaggcctctgtacaacatgccctggggctggccttgccatagctgctgaacagttgatgaaaccagtccagagaggggaggtgactgcccagggtcacacagctcaagctgatgatgtcactgggaaaggtgccagctctgggcagcagcttgacttccactgcaggccccaggccccagggtcaaacactggctctggagccagcggaagcagcccatgggtccgtttgaaaggctgaggaggcccaggagtcttccctgtgtctgccctgagactttcctacagagtacaggttttgatgttcagttttaaaggcaagaatcaataaccttcggccccatcaggtgaccccttgtgcctgtcccacccctttattgactgacctcggctcagtcaggccagttcctgaaggtcagtgtgtggaggggaggctgttctttcccagaaaggccttccccaggcctggtgctctggcctctggaggacttcctggagaagtcccttctttggcatcccagtcagtgtatgggaagcccttactgcatgacctggcacggggcaggggctcaacagtcactactgccttccttggcgctgccatttcctcctctgtaagcaggtgattgtgtgtcgagtctgagcacacagataagcacacagcaggtgcttaataactagcagctgcaggctgggtgtggtggctcacgcctgtaatcccagcactttgggaggccgaggtgggcagatcacctgaggttaggagttcgagaccagcctggccaacatggtgaaaccccatctctactaaaaatacaaaaattagccaggcgtggtggtgggtgcctgtaattccagctacttgggggctgaggcaggagaatcacttgaacccaggaggtggaggttgcagtgagccgagattgtgccactgcaatccaacctgggtgacacagcaagactccatctcaaaaataaataaataaatacataaccagcagctgtaaatgtggctgttgttcttcacctccacactcagtgccactccgctcccttcctccgtggtgtgagggtcctcactagctgtcttctaggaggagcatggctgtgagattccagctccatccttggccacagctcctggagacatctcagagaccaggatctggaaggctcccacaccccatttgacaggggagaaactgtcagttccaggtccccttgcacatcagggccagagctgagttaggctcccagtctccaggccactgggccagagctcacaggctggcaaagggttagaactgttactggtggctgggtgtggtggctcacacgtgtaatcttagcactttgggaggctgaggctggcagatcacgaggtcaggagatcgagaccatcctggtgaaaccccgtctctactaaaactacaaaaaattagccaggtgtggtggcgggggcctgtagttccagctactcaggaggctgaggcaggagaatggcgtgaacccaggaggcggagcttgcagtgagtcgagatctcgccactgcactccagcctgggcaagagagcgagactccgtctcaaaaaaaaaaaaaaaaaaaagagctgtcactggtgacagtagcatgaggtagatcatggtctacaccaaaatgggggatgtagtgccactgaggccagagggaaccacaccctcaaaggtggggagttatggtatgggggggtcctgggcgtggagtcttttaattcttcagacaatcctgggagcagctgtccctgtttcatagagagtggggtcacacagctggtgagtgggcagccaagactctgttcaagtttgtgtgggttcaacacttgtggccacggtggaggggcatctgagccaggcctcagagagtggcagggagaagttgggtggggcagggcgcccttctcattcctctgaggctcatcctctcggtgcctccatttcctggaaagggataataaggttattgtgaggatcccctgagttcatatattcagacacttagagccaggcacacagaagggccggggtcggctagtttgattgctgaggtaattgctaatatcttccagtttctattggtcaaggttccgcagagaagcagagccagtaggatgtatatattaagagtttcaaggaattggctcatgtgaccctgggggctggcaagtctgaaatccacagggcaggccaggcaattcctgcagaatttgatgttgcagtattaagtcctaaggcaggcctggagtagaattccttcttccctgggaggcctcagtgtgttctctgcaggccttcaactgattagatgaggcccacccacgttacggagagtaacctgccttactcagtctcctgatttaaatgttagtcacatctaaaaagtattttcgcagcagcatttccactggcttctgaccaaacatcaggtcaccaagttgatccccaaaattaaccatcactctgtgcctgtaagggaggggctgggaatggggaacagttctccccagggggtgacctaggtttgttcctcccaggcctggagtttattcggaaaagccagctggtccagcccgtggggccactggttgtgctgctgcccctggcgggtgggtacagccgggtcttcaacgccgcctgccagcgcctggcgagggctggggtcgtgctggtcaccgctgccggcaacttccgggacgatgcctgcctctactccccagcctcggctcccgaggtaggtgctgaagctgctgccccaagacggggagcgaagggcaggcgggcctcgtgggcttcttgcagcacgttcctggaggctgaacccttctggctttggaaggagtcgtcagagcccccccgccatgcgggaggctggggaggaatggcctcgagcctccatcatcccagagtctgaacagcagtgaccccgccacgcccccacgtagcggcgcccacgaagccacgcccccacaccccgtcctggccactctccctcttgagggtctcctggtagccgccccctccccatctccctccccaggccctgcgtcctctgcccaatagtcttagggcccgcccaatattcttagggcccgcccaatagtcttaggccctccccactatccagatccctccgcagctgcatgactgaccacttgagcgaggctaatgtgaatgggaacagttgagggctcagacctcacccgagggacatccagagagtgtgccgcagggccgtgcagtgtggctgccgggacacagacacggagcctcggccctgaggagctggggggcagtgaccgtccctcctgtgaccaccactcctccagtgtcaggtcactgcgggtatctaggggagagaatcttgttccacttcaagtctggaacttcaagtctgtgtgtgtgcgcgcgcgcgttgtgggtggggattgcggagcagaagcatacctgacagcggtaacccagatcctccctggcctcggaggcttccctggcagcccaatttaaaggcatcaagcaaacaaagcccaacacatctctgccttgccctctcagtctccccccgtggcacttagagccacctgatacaccgagtagtttcctatctccctcactagaatgtaaactccacaggggcattgggaatgctgcctggctatggtagggacagaggggagcaccagggcggggcaggggtgccagagttctgcctggggagtcagattttccttaggaggggacatttgaatgggacccaaacaggtgtatagcagttgttcagcccagctggcaaggcctcagtttgcttctgcaacccctctcttgggctcctttctgtgccacctacctcctcacctttccaggtcatcacagttggggccaccaatgcccaggaccagccggtgaccctggggactttggggaccaactttggccgctgtgtggacctctttgccccaggggaggacatcattggtgcctccagcgactgcagcacctgctttgtgtcacggagtgggacatcgcaggctgctgcccacgtggctggtaagtcaccaccccactgccttggccaccgtgatgctaacagccctttggcggtcagggtctgtgccaggacctccagtgccaggctctgtgcagggggaccagagatgagacaggcctgatggtgccttcatggacactcagtctgatgagggagacgagtgcacagtgggaacacgaggttagggctgtattagagggagcccagaggaggcacctgcccagcccgagggtcagagaaggcttcttggacaagggacatttgatctggagcttgatggatgaataggagtccacctggccgataagacagcaactaccaaggcttagaggtgtgacggaaggctgtcttacctcactgtgtgagggactgcaggcggcttaccttctagaagagagcttggtgtctctggtgtgtgcacgtgtttttgtgtgtatgtgtgtgcgtgtgtgcactggcaggagtcccctgctggggcaggagggtcaggccgtcaccatctttcaccattcacccctgtaccaggcattgcagccatgatgctgtctgccgagccggagctcactctggccgagttgaggcagagactgatccacttctctgccaaagatgtcatcaatgaggcctggttccctgaggaccagcgggtactgacccccaacctggtggccgccctgccccccagcacccacagggcaggtaagcaggacggcagggtgggcgaggccaggctggggcttgggaggtctgtgtgaccttgacagtctctcccctctcccttgtctgtgtaaggaggatgacaccaccttaaataggattaaatgagaagggggctctgaaagggctttgcaatattttcataacatgtttttatagagacagttgagtatgttctttaagccctcctctctcctaccatgaactaaagatttttgtggaggtcccctcactcccagcaccccctcctcatcccaggcactttttgcaggttggcagctgttttgcaggactgtgtggtcagcacactcgggtcctacacggatggccacagccgtagcccgctgcgcccaggatgaggagctgctgagctgctccagtttctccaggagtgggaagcggcggggcgagcgcatcgaggtggctacccctccttcgtgtgtgtgtgtgtgtgtgtgtgtgtgtgtgtgtgtgtgtgtgtgtgtgtgagtgctgggccctgagggacccgcagcaagcccctccatcctcgacactccagctcttctgtaagcttacagggctggccagagcaggagtggggcactcctcatctcacgctgctgggggccgctggagagagccacagtgagaaggatttcctagaggctgcaggacagtgctggatggattttcaatgggtgctggatgggtgtcagcgtgagggtcagggatctgctactctggactcagccatctctaggcccttctcactcaggtgctccatggttctgggagctgagaaatctcaaaccagcaaaaaaggggaattgatgttgatgctacagggtagtgcacagatgccatctggtcgcagcgttttggtggaagggcagtgcccagtcaggagagtgaggaggggcaggcatttctggcctgggagatggtgtcttaatgcttgtgtgggaggcagagtgggtggggtggagcccgctgggtccttgctttggcctcttggatttccctgtatctccattttgaaaccactctgtgtttggaagaacttttgagtattcagagctgcccattggcagaacagtctactttgggcaggagcgagctccttgtccccagaaggctaggggcagggtctgactggcccctggtagggacactgacgagggtgcttgagttgatcctgtctagtccctttctctgttttcaaagcccattctaaagcagattcctatttctgtctttgactctcaggcccaagggggcaagcgggtctgccgggcccacaacgcttttgggggtgagggtgtctacgccattgccaggtgctgcctgctaccccaggtcaactgcagcgtccacacagctccaccagctggggccagcatggggacccgtgtccactgccatcagcagggccacgtcctcacaggtaggaggctgggcctgccctggggtgaggagagttccctttctccttatgcacccactgccctcgaggcttggtcctcatgagtgtgatccatgagactggaacccgactttccattccatactctggttctgtcacttccatgccctttgaccctgggcaggtgaccttacttctcgtctcagcttcctcctccataagagggaaaaaggtatcacctgcctcattgtgttgcgaggagatagggcactggcctggagcatggcaggtgctttgcctaaggtggtgcagttcaggagaggcagctccagagagaggaccccggctggggctgaaaggagggcagacctcggtttgaatttcactctgccactcgatagctctgtgacctgagcaagttacttaacgtctctgtatgaggaaatgatgggtgctaagcacttagcttaatgcttggacaatatagattctagctatcgttactattattgtcatcacctgttgctttaaaatccagtctctggtataggcaactattgataggctaccctgtgtcgaaaacatgtccaggcaggtagcaggaagtcacagatggggactcttggggcatcaagggctggcgccccaaggctgagctgttctggttgggtggagcgtgagaggtctgggaagacagtggagctccagcctggaataagaggctcagagttgattctcgtctgagcatgtccaggggagccactgagggtttgggaacaggaaggtgagggtgagaacctaactctgggcacagcaggctggcatgtgggatggatgttcaggaaagatgagcgtagtcaggtggctggtgcccttgtccaggggagaggctccatccggtccggggatcctggcttggagggaagtccgccatgctgtaatcacactcccctttggaagtgctcagccgatgaactcacaggcacatgtcagtttgaagtcatggaatctgactctatgaggcacacctcaaagagccccattttgcagctaagggaactgcaggctggacatgctgagtgactgccctgagcccttgcatctaggacatagagaatgctagtaaccacgaccctaccatgttcagagcacatgccaggctccatgctggcgcttcacacgtgtcatcttcacagtgtccctgtgagtaggtgcggtttctctttccatcttacaaatgagtaaacagagcctcagtgtagctgagtaataactattttcggtttcttagccaatgcgtgtgtctgactcctaagcccatggagggcatccccaggtggtccagacagaccccagcttaccgttgaacttctgcctgctggctgcatggggagtttgggggaagtttgagcatctcaggccatagagcccctgcttcactgtctccatctctgggtggagagatgatgtttttcctgagaaactaaggctcaggttgaatggctctcccatgggcacacagctggtcaggagtggagttgagaacacaggagtcctgatgctcaggccagcatctcttatcttctttgagttgtttctgggtttcctagctcctgcctcacactttaaagagagaaggtctgatggggatgggcactggagacggagcattccagcatttcactatctgagctggccttcctctgacccaggctgcagctcccactgggaggtggaggaccttggcacccacaagccgcctgtgctgaggccacgaggtcagcccaaccagtgtgtgggccacagggaggccagcatccacgcttcctgctgccatgccccaggtctggaatgcaaagtcaaggagcatggaatcccggcccctcaggagcaggtgaggaggcctgtgaggacgggtgggtggggtgccgtggggtggcgtgagtctctcctgtgcagcttttctgggtcagtttgtgccaccaccataccgccatgcatcagggtggcggtttgccgggtagatgctgtgggcagcttccgccattgtgtggacagtgtgtgtatgtatctgtgtgtggctgggtctgtttttgcttttgtccagatcagtaaggtttgttgcctgagtaccccactccacttggtgtagaatgtgcataaatttgccataaagaaatacaatatgcatgcatttattgattgatctatttttttctaagatggggtcttgctatgttgtccaggctggtctcaaattcctgggctcaagcgatcctctggcctcagcctccccaaatgttgggattacaggcatgagccactgcacctggcctctctgatctatttaacaaacctgctgggaggttctcagggtcaggagcagcactgggctgtgaggacacagagctcactcagccatgacccagagggggtgcctgagctgcatgccgaaggttgttagcatgaccagcaaggcaagaaaaggccctgcggagattagcgaggcacgtgccaagccctggaatgtgagagccaggccttctagaaacctgggtgtggacatgaccaacagttgctctggaactctcctttttaaaagccagtgggagcttcttcaaaggcagccctaaggagtccgctcttaaatgaactcagactcggttttaaaatgcaagtctgtgttgattctggtctggatggtgcattcctccatagcaaaagacagtgttgttcttggatccactttccctgggtgcactgagggctgcgaggttccaggtgctcttccgggcactggggagggatacaggctggacagacatgttgttctccctcctggagcatctgttttagtgggggaggacagaaaacaaaccagtaaattacagagtactgaaaagatgcgatggagaaaactatagcaaggaagggaatggggtgggggagaagtcaggagaggtcttgctgagaaggtggaggaaatgggccatcaggcagggaatgtgttccaggcagagcaaaggccccggggtggggatgcgcccgggagtaccaggaaaccagaggtgggagtagttacgaggtgggggatgcctcagaggggacagggccaagtcaggtgagaccgagggccacagtcaggagtcagctggggccacacaggggtccagcctagggggagtgcgatctggcctggatctgaacctctcactgtggcctagctgctgagctgagaagagatgacaagggccttgggcagaagcagggagactggagggaggcggtggagggtccaggcgttggggcggggctcaggctggagtctgaagggagcctgcaggcctggtgggtggacatggatgggagaaggggaggacggcaccaaggctcgggcccctggacagatgcagttgccattaagtgggatggggcaggctgtggggccgtcagtttcagaaggaagatgagtttggcattggcatggtaggcatctgtctgtccccgcgcccctcaaaccaggcatgaagcaggagctcacgtgtttggtcatcgatggtgcagaaccgccggggcgggaggtgcggggtgggagatatgtgtttgtgtctcaaatgggctctgagccagggagggctatctgccccttggcctcacagcgggatgttggagggagaaatgaagtgtaggtgggggtcccgggccatgctggactgtgctttcttctcctcggctctggcaggttatcgtggcctgtgaggacggctggaccctgaccggctgcagtgccctccctgggacctcccatgtcctgggggcctacgctgtagacaacacgtgtgtggtcaggagccgggacgtcagcaccacaggcagcaccagcaaagaagccgtggcagccgttgccatctgctgccggagccggcacctggtgcaggcctcccaggagctccagtgacagccccatcccaggatggtgcctgggtagggtcaggggctggggctgagctttaaaatggttccaacttgtccctccctcagccctccatggcctagcccgaggggacggggatgcttccaccttcctggagctgctggcctggcccttgagtggggcaggctccttgcccagaactcactctggatgccccctcccctggtggaggtgccaggaagctccctccctcactgtggggcatttcaccattgaaacaggttgagctgtgcttggtgctgccagctgctcccaacatgccaacatctgtgggcagaacggcttttattgagctcttgttcggtgccaggcattcagtcctcacgtctccaccaaggaggcaggattcttcccatgggtaggggaggaggtggtaggggcagcagggacaagcatcgtcagggggcgagtgtgaaagatgctgatggccctcatctccagctcactgtggggaagccccttggggctcccttgattagtggaggctcagctttttggatggcatctagccagaggctggagatcaacgcgtccctggtggtcatgggctgtgccttgttttcctgagtgacctttactctgctctatgccaggctgtgctaacaacacccaagggtggcctgcagggagccgtcacctagcactgactctgcagtgtgcaatggtgcacgcaccgtctcagccaacccgctccactacccagcagactacacatttgcacccctgctttacaggggaagcaacctggaaccagaggaggcatgcctgccaagctcacacagcaggaactgagccagaaacccagattgggctgcctctgaagccaagcctcttcttactttaccccgcaggtaacagtgaggctgggaaggggaacacagaccaggaagctcagtgagtgatggtggaacgatgcctgcaggcacggaacttttcccgtatcatctaggcctgattcactgtggcctgatggagatgcttctaagggatggtgggaggagagggacaactgtccctccttgagcaccagccccacccaagcaagcagacatttatcttttgggtctgtcctctctgttgcctttttacagccagcttttctagacctgttttgcttttgtaacttgaagatatttattctgggttttgtagcatttttattaatatagtgactttttaaaataaaaacaaactttgtcctgacttttgcatagacttgactgcctcgggtgatgccttgtttatactaggaactgggtaagtttgttgagtaagccaggtacttgtatcttgagtacaagtattgggtaagtactggtgatgtgaacttactccctgtgcctgtcctaggaatgaaatgaatgtcttcctgcagctcccctgatgaccctggcagtcaaagtgcctcctccttggtgacggatgccctacatcctagatgctctgttgtcctaacctcccaatccccttttcattcttttctccccagttcctggcacagggcctggcccagagtatttatggaataaattacagtgccagatgcttctgtgatgagccagtgctaagtctatggctatttttcatgatttaaaattcagaacagtctcaggtcgggtgcaatggctcacacctgtaataccagtactttgggaggctgaggcttgcatgtaggagttcaagaccctgggcaacacaaacgtcatctctacaaaaaaaatttttttaattaggtaggtgtggtagcacatgcctgtggtcccagatactc

SEQ ID NO: 1545 - DNA, 3891 bp, Homo sapiens
  source 1..3891: mol_type = other DNA
ttatgagagaaaggcagagggagatttgacacacacaggaggggccacgtggagacagaggtggagattggagaaatgtggccacaagccagggaacaccagcagccaccagaagccggaagacgtgaggcagggttcttcccagagccttcgctgctgagtctgggaatttgttaccgaagccataagaagtgggtacacgccctgagcctcccacacttgctcacctgtcctgagatgagaatctctactctgcagcatatttggaggatcactgcgggggccacagaggtgctgttcagatggcacttcagaagactcaggagaccctggggcaggagcagtttgactgacagcccagagggctgccctctgattccacctgaggccctgcttttcctggctgcaggggttccagggccaggccatttccgctggcgcaggactctgctagcagcaacctgcctgaagtcttcctttggcctggctgagagtttctgagacctgcgctggagcggaggtgcttccttccttgcttcctttcttcctctctcccttctccatccagcaggctggacctgcctggcatctgtgagctctccctactttctcctataccctaacctttgtcctgcatgggcgactcccccagtgagtctcttgcagcttttaccccagtgcctgcttcttggagaatccaaactgatccagttagggatgataaagtgtagggtaggtgctcggtgactgttttctctgaggttgtgactcgtgtgaggcagaagcagtccccgtgagccctcctggtatcttgtggagtggagaacgcttggacctggagccaggaggcccagacatacatcctgtccgagctgcagcttcctgtctctaaaatgagccggccagcgcaggtggccagacatcactgttattctcctttgagtctttaaatcttgttgtctttcttgcagactcggtgagctgtgaaaggctataataggggctttattttacactttgatactattttttgaacattcatattattgttagatattgatattcatatgaaggagcaggatgacttgggtccttcttggcagtagcattgccagctgatggccttggacagttacctgccctctctaggcctccctttccttgtctatgaaatacattatagaataggatgtagtgtgtgaggattttttggaggttaaacgagtgaatatatttaaggcgctttcaccagtggctgggatgtgctctgtagtttctgtgtgttaactataaggttgactttatgctcattccctcctctcccacaaatgtcaccttggaaagacggaggcagcctggtggaggtgtatctcctagacaccagcatacagagtgaccaccgggaaatcgagggcagggtcatggtcaccgacttcgagaatgtgcccgaggaggacgggacccgcttccacagacaggccagcaagtgtgacagtcatggcacccacctggcaggggtggtcagcggccgggatgccggcgtggccaagggtgccagcatgcgcagcctgcgcgtgctcaactgccaagggaagggcacggttagcggcaccctcataggcctggagtttattcggaaaagccagctggtccagcctgtggggccactggtggtgctgctgcccctggcgggtgggtacagccgcgtcctcaacgccgcctgccagcgcctggcgagggctggggtcgtgctggtcaccgctgccggcaacttccgggacgatgcctgcctctactccccagcctcagctcccgaggggaggacatcattggtgcctccagcgactgcagcacctgctttgtgtcacagagtgggacatcacaggctgctgcccacgtggctggcattgcagccatgatgctgtctgccgagccggagctcaccctggccgagttgaggcagagactgatccacttctctgccaaagatgtcatcaatgaggcctggttccctgaggaccagcgggtactgacccccaacctggtggccgccctgccccccagcacccatggggcaggttggcagctgttttgcaggactgtgtggtcagcacactcggggcctacacggatggccacagccatcgcccgctgcgccccagatgaggagctgctgagctgctccagtttctccaggagtgggaagcggcggggcgagcgcatggaggctgcagctcccactgggaggtggaggaccttggcacccacaagccgcctgtgctgaggccacgaggtcagcccaaccagtgcgtgggccacagggaggccagcatccacgcttcctgctgccatgccccaggtctggaatgcaaagtcaaggagcatggaatcccggcccctcaggagcaggtgaccgtggcctgcgaggagggctggaccctgactggctgcagtgccctccctgggacctcccacgtcctgggggcctacgccgtagacaacacgtgtgtagtcaggagccgggacgtcagcactacaggcagcaccagcgaagaggccgtgacagccgttgccatctgctgccggagccggcacctggcgcaggcctcccaggagctccagtgacagccccatcccaggatgggtgtctggggagggtcaagggctggggctgagctttaaaatggttccgacttgtccctctctcagccctccatggcctggcacgaggggatggggatgcttccgcctttccggggctgctggcctggcccttgagtggggcagcctccttgcctggaactcactcactctgggtgcctcctccccaggtggaggtgccaggaagctccctccctcactgtggggcatttcaccattcaaacaggtcgagctgtgctcgggtgctgccagctgctcccaatgtgccgatgtccgtgggcagaatgacttttattgagctcttgttccgtgccaggcattcaatcctcaggtctccaccaaggaggcaggattcttcccatggataggggagggggcggtaggggctgcagggacaaacatcgttggggggtgagtgtgaaaggtgctgatggccctcatctccagctaactgtggagaagcccctgggggctccctgattaatggaggcttagctttctggatggcatctagccagaggctggagacaggtgtgcccctggtggtcacaggctgtgccttggtttcctgagccacctttactctgctctatgccaggctgtgctagcaacacccaaaggtggcctgcggggagccatcacctaggactgactcggcagtgtgcagtggtgcatgcactgtctcagccaacccgctccactacccggcagggtacacattcgcacccctacttcacagaggaagaaacctggaaccagagggggcgtgcctgccaagctcacacagcaggaactgagccagaaacgcagattgggctggctctgaagccaagcctcttcttacttcacccggctgggctcctcatttttacgggtaacagtgaggctgggaaggggaacacagaccaggaagctcggtgagtgatggcagaacgatgcctgcaggcatggaactttttccgttatcacccaggcctgattcactggcctggcggagatgcttctaaggcatggtcgggggagagggccaacaactgtccctccttgagcaccagccccacccaagcaagcagacatttatcttttgggtctgtcctctctgttgcctttttacagccaacttttctagacctgttttgcttttgtaacttgaagatatttattctgggttttgtagcatttttattaatatggtgactttttaaaataaaaacaaacaaacgttgtcct

SEQ ID NO: 1546 - DNA, 29001 bp, Homo sapiens
  source 1..29001: mol_type = other DNA
acgttttaaaaaaaacattttcatgtaaatttaaaaaaattgaacattcacacaaaaagatgccccctcccttgcaaaaaagagtatgcccgttcaaaatgttgaaatgtacactcacagcaatggtggctgcagactccaagtttctgaggttggagaaggtagccagggagcataaaagtgagttctatctactcattcagtctatgaggggaaggcaatggctagaaaagcattttgagggacagtaaaagtggcatttttagagggaggaagccttgaggatgcttgtggggtgaagggaaagaataactcaggaagaggcatttagggataagaggaggagaggagatagtggaggtaggtgatccctgcggaggccagattggggcaggggagtgtcagctgagtataagaggatggtcccctctgccctgaaggaggaaggcaggaggggaaaaggatgggtgttgacccagaaagcacttgtggtggaggggaggccccagaagaggcttctgacttaccctgattgctggtacctctcaggggagctggctgcttatttgctggccagggtgtgggggaacccatttgagaagagggagaaggtgacacaattcctttgggcaacttatgggaggggtaattggtgagggatgaaagccctgccaagtggcaggaggcccagctggggctgcccctcataagagtgcagtggaggatatgggatgagaagtgactgcccctctggttccatctgtcgcagagcccagggtgcttccttcctcccccacctccctcagaacacacccactgcatgctggacagcagcccccttcctgggcctggggacatccatgtccctctgtgcacaggcttcatcattctctgggtgcacggtaacgaccccggtaggtgagaggccaaggtcccaaaggggagcagcagggaaagttagctcccatctattcttgctccaggggaggcctttgatgaggaagctgccaaaagcacattgcaaatacaattccaattacaggcaacaggaaggagaaccacctctgccacctctgtcagcaaaccatgagctcctactctgtgctgcgatggcgggctcgatggggataactctgaccttacctcatggagtcactgtcaacccactggttgcactgtctttgtgcactggctctctggagtgaggtctttgcaaacaaagtggaaagagcatcaactttggactccagcacctagattcagagcaggccatttcactcggaatctgctgtgcatctgcaagggaggatcataaattcgcctttgtttcttcccagtatcgacagcccttccagaaagagcaagcctcatgtcatgccacatgtacaatctgaggccaggagctctctttccccttttcatcctcctgcctggtacacaataggtgtttactggatgcttgtccagttgatttcttgaacatggtgtgtaaaaggaatctttgcaaattgaatcttctggaaagctgagcttgtgcctaccatagaattctgaatgtacctatatgacgtctttgcaaacttaaaacctgaatctttgtagtataaatcccttgaaatgcatgtaggctggacatcaaaagcaagcaatctcttcaaggagcagctagttggtaaggtcagtgtgcagggtgcataaagggcagaggccggagggggtccaggctaagtttagaaggctgccaggttaaggccagtggaaagaattcggtgggcagcgaggagtccacagtaggattgattcagaagtctcactggtcagcaggagacaaggtggacccaggaaacactgaaaaggtgggcccggcagaacttggagtctggcatcccacgcagggtgagaggcgggagaggaggagcccctagggcgccggcctgccttccagcccagttaggatttgggagttttttcttccctctgcgcgtaatctgacgctgtttggggagggcgaggccgaaacctgatcctccagtccgggggttccgttaatgtttaatcagataggatcgtccgatggggctctggtggcgtgatctgcgcgccccaggcgtcaagcacccacaccctagaaggtttccgcagcgacgtcgaggcgctcatggttgcaggcgggcgccgccgttcagttcagggtctgagcctggaggagtgagccaggcagtgagactggctcgggcgggccgggacgcgtcgttgcagcagcggctcccagctcccagccaggattccgcgcgccccttcacgcgccctgctcctgaacttcagctcctgcacagtcctccccaccgcaaggctcaaggcgccgccggcgtggaccgcgcacggcctctaggtctcctcgccaggacagcaacctctcccctggccctcatgggcaccgtcagctccaggcggtcctggtggccgctgccactgctgctgctgctgctgctgctcctgggtcccgcgggcgcccgtgcgcaggaggacgaggacggcgactacgaggagctggtgctagccttgcgttccgaggaggacggcctggccgaagcacccgagcacggaaccacagccaccttccaccgctgcgccaaggtgcgggtgtagggatgggaggccggggcgaacccgcagccgggacggtgcggtgctgtttcctctcgggcctcagtttccccccatgtaagagaggaagtggagtgcaggtcgccgagggctcttcgcttggcacgatcttggggactgcaggcaaggcggcgggggaggacgggtagtggggagcacggtggagagcggggacggccggctctttggggacttgctggggcgtgcggctgcgctattcagtgggaaggttcgcggggttgggagacccggaggccgaggaagggcgagcagagcactgccaggatatcctgcccagatttcccagtttctgcctcgccgcggcacaggtgggtgaaggagtgaatgcctggaacgtactgggaactgcaccaggcacagagaaagcgggcttgccattatagtgggttccgatttggtttggaaaacatgggcagcggagggtggagggcctggagagaaggccctacccgagacaggggcggggtgggaaggacggcagatgctgggagcacgaggcaatttctttatgacacagaactcatgctctagtattccatctgtttcagccgaagaaaagaaccagctgaaggggcaggggagaaggggcggaggtattctcgaggcccattggcgtcctttaggactcaggcagggaagggcccttggtgctctggagccggaggtggtgcgcctggtactgggaccccggagctgagcccggcgcctcagcccacctggctgtctgccgaccgtgtgcggggcgagtttgctcaacaactctgccagcttctggccctcaggctgtgggaagcttcttcccggggcgagaccactagctttttctaagtattaccagcccaggacttggctgaggttctgtgtcccccagcttggagtcagatgtggggttgaatcttggcttcctctcactagctgtggtgcttgacaagtcacttatccttgagcctccattgcctaatctttaaaagggaggtgacaatcgtccctacggctcagtggcagcagatggggagatgaagggaaagttctgttgaccatgagtgaacttacaatgcaagccccggggggatcacttgcagttttgtccctgtctgcagtgtgacctgttggtgacattgtctttgctccaaaccacagctcctggggcagaggggaaaattctgccactcacagctgcctgcccacgcttctgtctgagtgtgctgggtggcaggatggcaagtccttactcagctcagtatagccctcttccttgttccctgagcctttgactttctcgagggatgttgtggggttgtggccaggataagaaagggcatttcaagttaccactgctccaaaacaactgttctggaaatagtgagtaccccatcctgagaggtgagtaagcagaggctgtatgaccacctgaaccaagcccttgaggatgtttcttctctggtggaagtttggaacaggagcctcctcaagttcatttattcattcattcaatggttattttgtgggaatcgaatttagaatgaaaatattttttggcaagcagaaaataatttttagaccaatccttttcttttagtcatgagaaactgaggcccagagagaggaggtcaccccaggtgcattagaactgggtttccagaactgacactccactgcacagagtactctcccaattcattcaatttttatttagcggaaggcattttcagatgggtctttgaagcattagtaggagttcagcgatgatggtgtcatgagaattttattctaggattaggaggtaccatgaacaaagatacagagctgggaaaaccagaggtggaagataaggagcacatgtccacagttctttttcttttttttttgagatggagtttcgctcttgttgcccaggctggagtgcaatggtgcagtctcagctcactgcaacatctgtctcccgggttcaagtggttctcctgcctcagcctcccaagaagctgggattacaggtacctgccaccacgcccggctaatttttgtatttttagtagagaaggggtttcaccacgttggccaggctagtcgcaaactcctgacctcctcagtggatccgaggaggtgatcctcccgcctcagcctcccaaagtgctcgaattacaggtgtgagccaccacgcctggcctccacagttctttatccaccgtctgaaatgtaaaatgttacgaaaaccaaaagttttttttgtgatttatttgatggtagcacctgacgtgaactgacatgagattatttttaatttagttgtgtgaatatgcatattcatatattttgctgcatagattacagtatgcagctccagattcttccaagcagactctgattgcccattactgcctttctaaaatccaaacaagttctgaggttcaaaaccgttttggccctaaggctttgggtaaagggggtggactctgttctactctgactggagtccaagatgcatatatacagagatatgggtgatggggctgcaaggtaggttgaggtaggggccaaggaggagcatggagtttggacttgattcatgaggctgtggggagccagtgaaggttcttaagcaggtatgtctgcctgagagcagttggagcagacaagagctaaaaaccaaacaaatcaccatagatagtggctgctataatttgtttgtcccctccaaatctcatgtggaaatttggtcctcagtgttggaagtggggcctaatgggaggtgtttgggtcatgggggaggaacccctgtgaaaggcttggtgccgtccttgtgataatgagtaagttctcccgctatgatttcccttgaaggctgattattaaaaagagcttggcacctccctctcttctctcttgcttcttctcttgccatgtgattgatctctgcacatgtaggctccccttcaccttctgccatcagtgaaagcagcttaaggccctcaccagaagcagatgctggtgccatgcttcctggagagcttgcagaatcatgagctgaataaatcccttttccttgtaaattactcaccttcaggtattcctttatatagcaacacaaaaggactaagacagtggccttgacttttctctctctttaagaagtgttgcctttgctcacttagtcatcccttctgcctgcatttgtagagcatctggatgggagatttatataaccgtcactcttgactttcccagcaggcctatgtcataggtactgtggtctctacaatacagcagaggtatctgaggctccgagaggttgagtgacttgctcatggctgcacaaccagtaaatattggagctggaattcaggtccacggtttcctggctccaaagcccatgattttttccctcaatttattctgactggggcatgggggagggggtggcctttgggcagggccaccaggagcgaccaggcccgtagagagctgggtgcaggtacagaggaaaacctgttgtcgagtgtggcccgtagttcccatttttgcctgaatggcacatttgaaagtgttatataaccatgtgaataataatagttggcctatatgagttctttaatttgctttttggtccgcatttggtaacttctttatcatctactatactctgttgtgtctcttttgttgtaatttgtaagtaggggtgagataaagtacacctagggtttgctgggtttcttccatgtcatcatgttcctccttgcatggggccaggatccgtggaggttgcctggcacctacgtggtggtgctgaaggaggagacccacctctcgcagtcagagcgcactgcccgccgcctgcaggcccaggctgcccgccggggatacctcaccaagatcctgcatgtcttccatggccttcttcctggcttcctggtgaagatgagtggcgacctgctggagctggtgagccaccctttttgggaatggcacttcctgatagggctgggccactgcatatacactggggactgtgcttagtaggcccattgctgaaaatcagaaggggacagcaagtatgtattgagcacttatcgggtaccaagcacagtaactactggctttctgtatagaattccctttaagcctggccatgccccagtggtacgtctatcttcatttgaaagacgaggagactgaagttcagaggggaccacacagacagctaggggtagagcctggatcaaacccattggtctgcctgccagccattcttgtgccaatgcatctgctgcctacggaaacctgtagggacaaggccctgggatgttcagtggagcctgagtcattttataaaaaagcatgactctagggtccaaaattcctttgaagctgttgctatccagagtgaagtcccttctttaggacagggtggccctcctccctcctggatgtcacatcttcggtggaggggcagaaaggggactgggtattctcctcaccctggccctagtgcttcaaatcttaaaaaaacgtttttatttgtgcttctgcaccaccttctagcccacctcgtttcctggcctctaacttgatgagagcgtgtgtcattttcacactgattctccacatggcaggcggtgcttcttagcctcctgcagacagtgaggccccacggtcttgtccaaggtcacacagcgtgtaatgggcagggtcagagtctggagtctggacctgggtctcctagctgcactgcactgctgccccatgggttaatcagctcagcataccgtggctgaacagctacctcataccaaggcctgtggcgccatgacagggattgacagggtccctgccttggaaacccgtagtctaagtagaggagactgacaagtcaatgccttccatcagtctgctcaacacacgtttaccaagtgcctactgtgtgctgcagaggcgaagatgacacagctcaggcctttcccttgagcttacagttcaggaggagagactgaccagtgactgccagtacagttgactatgggacaatgtgctcagccttggggagagacgaagaaggtacccgtatagcaccagatgacaggcacgagccccacaggccagggcagctgctcagaggagagtaggccaagcagaaggcaaacagaaggctgcaggcatttgccatcgagagctggacttcaaactgggcatcataccagcctgggttcgagtcctgcccagccccttattggctgtctaaccctgagcaaatcccttcacctctctgagcctcattcctctatctgtaaaccagttataataattggaacattcatttaaggactaaatgaggtcgtgaagcattcagcagatgctaggtacggaaactcgctgaagtgggggcaggttaagaagcctctggggatacgaaggcatccagggactagttgtggcaggaggctgttaccacttaggtctgaagggtaaggagagggaatagctttccctctgcccagttggagccggtggcatggaggagaggctgcctgtggggaatcacccgagggttcaccgctgccatgcgcagggagtcaggaggtagggagggagtggggcagatgcacaccatttttttttttttttgagactctgttgcccagactggagtgcagtggtgccatatctgcacctctgcctcccgggttcaagctcactgcaacctctgcctcccgggttcaagcgattctcctgcctcagcctcccgagtagctgggactacaggtgtgtgccaccatgcctggctaatttttgtatttttaatagagatggggtttcaccatgttggccaggctggtctcgaactctcgacctcaggtgatcccccacctcggcctcccaaagtgctgggattacaggcgtgagtcaccgctcccagctgctgatgcactcttgtccttctaactcctgctagtgcctcccattggctgagcccaactggaagctttgcaagggagctggtgctgcagtttgcactgagcaggctggagaaggctggagaatagactaggggacaaaccgaattgccagtgctgttatgtcatgatttaggcatggagtccagggcctgagcttcactccatgtccatcctgcccagagccttggcacagcctggctcccagacaagatgtcaagttcagaatccttcctaaaaggaatcctctatgccagaccgtgttgcagggatatgggagtgctgggctcccagcctgatcaaggagcgagaaaactcaggctcctagtctgtcctccggggcactagcagggacaaggtgggaggctgctgggctgggatgtggggacaggtttgatcaggtaaggccaggctgtggctgtgtttgctgctgtccaaatggcttaagcagagtcccccggcctctctggcttctgcaggccttgaagttgccccatgtcgactacatcgaggaggactcctctgtctttgcccagagcatcccgtggaacctggagcggattacccctccacggtaccgggcggatgaataccagccccccggtaagacccccatctgtgccctgccccaccccatctgagctgaatccatttgctctgccctggcctggcctccctgctggtggtttccacttctcggggggctttgggactcagcacctccactgacccctttttttctgtcccatccccatcccctgcagcccccactgcctgccttcctgttgccccacaaatgcaaaagtcttgccttaaatgatcctcttttccttcttttctcttgttttccttttctcaccatttggaatggcccagcaggctgcacttaccttggaaggagggttcatctgatggtgactctacctagggcccccaggcctctataactcccagtgccctgcagactggaccagatcctttaatgggatagacacaaccctgtctgggatgcctctgcctaccttcctgttttgctgctccacctgcctccagctccgtttggcttcctggggctccctgcctgggccactttgtgtcttccctctaggcctttctttccactgttccctctgcctggtgtggcctggctatggaagggagggaggaggagcggccatggaaaacggtctgcattctagcagggacttgcaggtggcaattcagtcggggaagactctagatgcacctggcctgaggagagaatgaagggttctagttggactgtgttaagtttgaggtgcccatggtgtgaggtctggagctcagcgcagagatgatgcaatgtggtgggtccatgcaacatggtgccaggacgcagagcttggggtgaactcagctttcaccccttaccggttctcgtgggatcttgggaagccactttcttctatgagctttgtcgttcttgtctgtaaaatgggcacataaccctgtccctgtccttctcacaggttgctgtgagactccaatgagttgaaggatgtgcagatgcttttggaagtgaaaagttggggggctactgtgtgactttgcatacacccaaactgtgtgaccttgcatatgtctgagttgctgccattgcaacagatcagagctggtgggctgggtgtggagaaagggtttgtgtgggggacatcctctggcaagggtggcagcagcagaagtgaggggcctggtcggtcatgtgtgctgacccggcctgggcagcctgtggccagggagaggacagctcctctgtaggaagagcctgttcctttccaaccaggtgagacctcttcagtggagccctggagccccctgtactccacatcagtgcctcagggacctcccggagcaggctaatatcagagaccaagagggacactggcagaggatcacagagaccccagtccaggcagggactgagaagatcttgccccctaagttagtttcctagcactgctgtgacaaattaccaccccctcggttggaacaagttgattctctgcagtcctggaggccagaagcctgaatcagtgtcggcaggaccactttctcccggggggctccagggagaagcttctcttgcctcttccgtgtcccaacagcggcagcacaccaatcccagcctctgtcttcacacagccttctctgtgtctctctcctcttcattgtctcataaggacacttgtcattggatttagggcccactggatcctccaggatgatctcatgtggggaaccttaaccacatctgcaaggaccctttttccaaataaggtcacagccacaggttgtgggggttaggatgtgagtgtatctctttggcagccactgttccctcctctcccttgggccagaagcagacgtggggccctttcttccccataggatgcccatggattgccccccttcccgcttcccccgagtgtctgtgggaggtggcaggaatggcaggcaggggtgtggaaccccttctggagtcatatcaagggcttggctggaggaagtcctcctggagctgttgggctggcatggggcaggctggctgggcccagcagcagcttcttcattcatggggaggccacaagcatgggccctagagctggctgccgccctcaaacccagaccctgcactcttaactgtgtgaccttgcatacgtcactcaccctctctgatcttcaggttcctctgcaaaagggaggtaatgataaccctcactctggggggctgtttggagggttaaatcagttattgctgtagcatgcatttctctgtcaggtattgagtgaggtgctgtgattttagccctgcatttttcttttcttaccattcaataataacgttttgagcacccactgtgcgccaggcaccatattaggtgctggggatacaaatgtgaatgaaatgaatgtggtctcttcccccaacagtgtatccagaagattaatccattccttaaacaaatgctacttgacacagattagttctggataggctgagagctctgaaggagtgcaggcagctgcgagcctgtgtatccagcagaaggatcaggaaaggattcctggaggaagcgctgttctagccaagacctacgggggcattattaaccaggcaaaggggacggtgtccaagcagtggaatgaacgtggattgaagctgtgaggcaggagggagtgtggcctgtgcagaagggaccgaggctggtgagaccaggagggcctgggtggcctccaggtcagatgtgaaaggaagaacttggccacagtctgagcttctcaggcgtatggcagggctgcctggtgagagggaatgagctccctgctctggaggtatgcaagcaggactgggctctcacctgccagaggccacagagctttccagaggctggaagaggccactccaaggcctctttgcccctgagagtggtggctcttcttgaggccaccttgccacgctgtcacagggaactagcagcccctgcctcacccgggggtttggaagatagagggaggcctaggaagggccctgtgtctcatccgagctgggcccctttccagcctctcactggaaggaagcccaaggatgttcctgtgggggcttttaccaggcccacctgccctctgctggccatgcttgcagcctcctgaccctgtcccagcaggacagtgggctggtgtgagcgggcaggaaccgcctgcacttagaaggtgtggggctgcctccccgagcttccatctgccgctggggccacaccccaggcccagggatgggaccccacagtggtcacatcatcttgcagcagaacccaggtacagctcctggagcagatggtggtcccaagcacgggtgggaccagaaaggactctcacctgggctaactcagctgcagcctcagttccctcctcacacacgacgaggaacatggactggaagcctgcccagcaggccttctgctcgatgtgcgttgtgtggcttacgtccagggagggaagcagcctctgtgctgtcttctagataagcctgtattccccgggctgtctgccaatgtatccagttgtcccgtcagcctggaagctctgagggaaaaccttgggctgcttcctgagcacctgtatcccctgcagccagcccggggcctctgctaggagcagactgagcatggcttatgggcctggcaccatctggcctctgcccaccttgctggccttgtcttgtgtctgccccttcgacattccatagcccagctcaatatctagtggttcctctagggtggcgagcactgtttggtctccagatgtcttcaggtcggagctcacagcgctctcagccaccccttcccagtgtagcaccgggcacatggtagatgcctattgatgagtgaaagctcctaacacactcagagagcaaggactccgcctcatcccacagcctgggaggagaggcagactgccaaggacctgctcagcatgctacagaagaaaccaaagtgcccacgggactgatcagtggagcttcctgccgagactggaggccttagggcagggtagacagtgtgtgtgcaggctggggactcacagttcggactgtgcccagacctactagcatagtgggtgggtgggaggatgcgggactgggggccgaccttgcctgaaattcatgtgggatctcagagcagccactgaattgctctgtagggggctaaatagtggcccccacagatacacacacccagacagagcctgtgagccagaccttatttggagaaaaggtctttgtagatgtaattaagcatctcaagatggcatcatctggattatgcggtgggctgtaagtcctgtgatgtgtctttatgagagaaaggcagagggagatttgacacacacaggaggggccacgtggagacagaggtggagattggagaaatgtggccacaagccagggaacaccagcagccaccagaagccggaagacgtgaggcagggttcttcccagagccttcgctgctgagtctgggaatttgtgaccgaagccataagaagtgggtacacgccctgagcctcccacacttgctcacctgtcctgagatgagaatctctactctgcagcatatttggaggatcactgcgggggccacagaggtgctgttcagatggcacttcagaagactcaggagaccctggggcaggagcagtttgactgacagcccagagggctgccctctgattccacctgaggccctgcttttcctggctgcaggggttccagggccaggccatttccgctggcgcaggactctgctagcagcaacctgcctgaagtcttcctttggcctggctgagagtttctgagacctgcgctggagcggaggtgcttccttccttgcttcctttcttcctctctcccttctccatccagcaggctggacctgcctggcatctgtgagctctccctactttctcctataccctaacctttgtcctgcatgggcgactcccccagtgagtctcttgcagcttttaccccagtgcctgcttcttggagaatccaaactgatccagttagggatgataaagtgtagggtaggcgctcggtgactgttttctctgaggttgtgactcgtgtgaggcagaagcagtccccgtgagccctcctggtatcttgtggagtggagaacgcttggacctggagccaggaggcccagacatacatcctgtccgagctgcagcttcctgtctctaaaatgagccggccagcgcaggtggccagacatcactgttattctcctttgagtctttaaatcttgttgtctttcttgcagactcggtgagctgtgaaaggctataataggggctttattttacactttgatactattttttgaacattcatattattgttagatattgatattcatatgaaggagcaggatgacttgggtccttcttggcagtagcattgccagctgatggccttggacagttacctgccctctctaggcctccctttccttgtctatgaaatacattatagaataggatgtagtgtgtgaggattttttggaggttaaacgagtgaatatatttaaggcgctttcaccagtgcctgggatgtgctctgtagtttctgtgtgttaactataaggttgactttatgctcattccctcctctcccacaaatgtcgccttggaaagacggaggcagcctggtggaggtgtatctcctagacaccagcatacagagtgaccaccgggaaatcgagggcagggtcatggtcaccgacttcgagaatgtgcccgaggaggacgggacccgcttccacagacaggtaagcacggccgtctgatgggagggctgcctctgcccatatccccatcctggaggtgggtggggactgccaccccagagcgttgcagctgtactcctgggttgcaccccccccagctgtcactgtcccctccctgccatcagttgtgggaagggcgttcatccatccagccacctgctgatttgttatagggtggagggggggtctttctcatgtggtccttgtgttcgtcgagcaggccagcaagtgtgacagtcatggcacccacctggcaggggtggtcagcggccgggatgccggcgtggccaagggtgccagcatgcgcagcctgcgcgtgctcaactgccaagggaagggcacggttagcggcaccctcataggtaagtgatggccccagacgctggtctctctccatctggacctggcctgggaggtggcttgggctgggcccagggagagctaatgtctcctaaccaagaatgctgtggcagcctctgccgcagagccagagaaccagagtgccaaggctggcagggttcccagtggccacgagtgcagatgaagaaacccaggccccaagagggtcatgcaggtagcccagggagttcagccttgaccctgggtcaatgacctttccacagttccacactgctccccttttaaaatccggtgatgtctttatgtcttttgttatgttatcttcaatgtggagggactcgaggtgatctaagcaaactttttctatcttctgcttgcatacctctgagaccaggggactcactcacttgcatgactgggccctgcaggtcacactggccaggcagatgtggtggaggaactggcagaggactttttctagactgtgactacatttagtccacccagcggcccccctatgaagtccagttgagaactaggactctgggggccggtggacagagaagagggagggttctctcccttactgacttccttctgtggccagacattgagcaaggcctctgtacagcatgtcctggggctggccttgccgtagctgctaaatagttgacgaaaccagtccagagaggggaggtgactgccagggtcgcacagctcaagctggggaactcgctgggaaaactgtcagctctgggcagcagcttgacttccactgtaagccccagcccccagggtcaaacactggctctggtgctggcagaggcagcccactagcctgtttcaaaggctgagaaggcccaggagtctgccctgtgctccaccagttctgccctgagactttcctacagagtacaggttttgatgttcagttttaaaggcaagaatcaataaccttctgccccatcaggtgaccccttgtgcctgtcccacccctttattgactgacctcggctcagtcaggtcagttcctgaaggtcagtgtgtggaggggaggctgttctttcccagaaaggccttccccaggcctggtgctctggcctctggaggacttcctggagaagtcccttctttggggtcccagtcagtgtatgggaagcccttattgcatgacctggcacggggcaggggctcaacagtcactattgccttccttgccactgccatttcctcctctgtaagcaggtgattgtgtgtccagtctgagcacagagataagcacacagcaggtgcttaataactagcagctgtaggctgggcgcggtggctcatgcctgtaatcccagcactttgggaggccgaggtgggcagatcacctgaggtcaggagttcgagaccagcctgttcaacatggtgaaaccccgtctctactaaaaatacaaaaattagccaggcatggtggtgggtgtctgtatcccagctacttgggaggctaaggcaggagaatcgcttgaacccaggaggtggaggttgcagtgagctgagatcgtgccactgcaatccagcctgagtgatagagcgagattccatctcaaaaataaataagtaaataactagcagctgtaaatgtggctgttgttcttcacctccacactcagtgccactccactccctccctccgtggtgtgaggggcctcactagctgtctcctaggaggagcatggctgtgagattccagctccatccttggccacggctcctggagacatcttagaggccaggatccagaaggctcccacacctcatttgacaggggagaagctgtcagttccaggtccccttgcacatcagggccagagctgcgttaggcctccagtctccaggccactgggccagagctcacaggctggcagagggttagaactgttactggtggctgggtgcagtggctcacgcctgtaatcttagcactttgggagggcaaggcgggaggatcatgaggtcaggacatcgagaccatccttgctaacacggtgaagccccgtctctactaaaactacaaaaaattagccgggcgtggtggcaggcgcctgtagtcccagctactcaggaggctgaggcaggagaatggcgtgaacccgggaggcggagcttgcagtgagccgagattgcgccactgcactccagcctgggcaatagagcgagactccgtctggaaagaaaaaaaaaaaaaagagctgttactgttgacagtagcatgaggtagaccatggcctgcaccaaaatgggggagtggagtgccactgaggccagaaggaaccacaccctcaagggtggggagttatggtatggggggtcctaggcatggagtcttttaattctttagacaatcctgggagcaactgtccctgtttcacagagggcggggccacacagctggtgagtgggcagccaagactctgttcaagtttgtgtgggtccaacacttgcggccacggtggaggggcatctgagccaggcctcagagagtggcgggggaagttgggtggggaagtgtgcccttctcattcctctgaggctcatcctcttggtgcctctctttcatggaaagggataataaggttattgtgaggatcccctgagttcgtatattcagacgcttagacagagccaggcacagagaagggcccggggttggctagtttgattgctggtgtaattgctaatatcttccagtttgtattggtcaaggttctgcagagaagcagaaccagtaggatgtatatattaagagtttcaagctcatgtgaccgtgcgggctggcaagtctgaaatccgcagggcaggccaggcaggctggcaattcctgcagaatttgatgttgcaatactgagtcctaaggcagtcctggggcagaattccttcttccctgggaggcctcagtctgttctcttaaggccttcaactgattaaatgaggcctgcccaagttatagagagtaacctgccttactccgtcttctgatttaaatgttagtcacatctaaaaaatattttcgcagcagcatttccactggcttttgaccaaacatcaggccacaaagttgatccccaaaattaaccatcactctgtgcctgtaagggaggggctgggaaaggggagcaggtctccccaaggggtgaccttggctttgttcctcccaggcctggagtttattcggaaaagccagctggtccagcctgtggggccactggtggtgctgctgcccctggcgggtgggtacagccgcgtcctcaacgccgcctgccagcgcctggcgagggctggggtcgtgctggtcaccgctgccggcaacttccgggacgatgcctgcctctactccccagcctcagctcccgaggtaggtgctggggctgctgccccaaggcgcgggtagggggcggagggcggagggcggagggagggcgggcgggcaggcgggcttcttgtggcacgtgggcttcttgtggcacgttcctggaggccgaacccttctggctttggaaggagtcgtcagagacccccgccatgcgggaggctggggaggaaggggctcgaaacctccatcatcgcagagtctgaatagcagtggccccgccatgcgcccacgtagcggcgcctacgtagccacgcccccacaccccgtcctggccactctccctcctgaaggtcttctggtacccgccccctccccatctccatccccaggccctgcgtcctctgcccaatactctttgggcctccctgttgtccagctctctccgcggctccatgactgacaacttgagcaaggctaatgtgaatgggagcggttgagggctcagacctctcacccgaggaacatccacagagtgtgccgcatgcccggtgcagtgtggctgcggggacacagacacggagcctcggccctgaggagctggggggcagtgaccgtccctcctctgacccaccactcctccagtgtcaggacactgcgggtatctaggggaaggaatcttgttccacttcaagtctggaacttcaagtctgtgtgtgtgcgtgcgcgcgcgcgcgttgggggtgggggttgcagagcagatgcgtacctgacagcggtaacctaggtcccccctggcctatcaaggcttccctggcggccgaatttaaaggcatcaagcaaacaaagcccaacacatctctgccttgtcctctcagtttccccccgtggcacttagaaccacttgatacaccgaatagtttcctatctcccccactaggatgtaaactccacaggggcattgggaatgctgcctggctatggtagggacagaggggagcaccagggcggggcaggggtgccagagttctgcctgggcagtcagattttccttaggaggggacatttgagtgggacccaaacaggtgtatagcagttgtccagcccagctggcaaggcctgagtctgcctctgcaacccctctcttgggctcctttctctgccacccacctcctcacctttccaggtcatcacagttggggccaccaatgcccaagaccagccggtgaccctggggactttggggaccaactttggccgctgtgtggacctctttgccccaggggaggacatcattggtgcctccagcgactgcagcacctgctttgtgtcacagagtgggacatcacaggctgctgcccacgtggctggtaagtcaccaccccactgcctcggccaccgtgatgctaacagcccctttggcagtcagggtctgtgccgggacctccagtgccaggctctgtgcagggggaccagagatgaagtaggcctgatggtgccttcaaggacactcagtctgatgagggaggcgagtgcacagaggaaacacgaggtcagggctgtattagagggagcccagaggaggcacctgcccagcccgagggtcagagaaggcatcttggaggagggacatttgatcgggagcttgatggatgaataggagttcacctggccgataagacagcaactaccaaggcttagaggtgtgagaggaggctgtcttacctcactgagtaaggactgcaggcggcttaccttcgagaagagagcttagtgtctgtgtgcacgtgtgtttgtgtgtatgtgtgtgcgtgtgtgcactggcaggagtcccctgctggggcaggagggccgggccatcaccatctttcaccattcacccctgcaccaggcattgcagccatgatgctgtctgccgagccggagctcaccctggccgagttgaggcagagactgatccacttctctgccaaagatgtcatcaatgaggcctggttccctgaggaccagcgggtactgacccccaacctggtggccgccctgccccccagcacccatggggcaggtaagcaggatggcagggtgggcaagtccaggctggggcttgggaggtctgtgtgaccttgacagtctctcccttctcccttgtctgtgtaaggaggatgacgccaccttaaataggattaaatgagaatggggctctgaaagggctgtgcaatattttcataacgtgtttttatagagacagttgagtatgttctttaagccctcctctctcctaccatgaactaaagatttctgtggaggtcccctcactcccagcaccccctcctcatcccaggccctttttgcaggttggcagctgttttgcaggactgtatggtcagcacactcggggcctacacggatggccacagccgtcgcccgctgcgccccagatgaggagctgctgagctgctccagtttctccaggagtgggaagcggcggggcgagcgcatggaggtgactgtacccctccttcgtgtgtgtgtgtgtgtgtgtgtgtgtgtgtgtgtgtgtgtgtgtgtgtgtgtcagtgctgggccctcagggacccccagcaagcccctccatcctccagactccagctcttctgtaagcttacagggctggccagaccaggagtggggcactcctcacttcacgcggctgggggctgctggagagagccacagcgggaagggtttcctagaggctgcaggacagtgctggatggattttcaatgctcacctgggtgtgagcgtgcggcagggccgcgtgagggtcagcgatctgctactctggactcagccatctctaggcccctctcactcaggtgctccatggttctgggagctgagaaatctcaaaccagcaaaaaagtggaattgatgttgatgctacaggatagtgcacagatgccatctggttgcagcattttggtggaagggcagtgcccagctaggagagtgaggaggggcaggcatttctggcttgaggagatggggtcttaatgctcgtgtgagaggcagagtgggtggagtggagctggctggatccttgctttggcctcctggatttctctctatctccattttgaaaccactctgtgtttggaagaacttttgagtattcagagctgcccactggcagaacagtcttccttgggcaggagtgagctccttgtccccagaaggctgggtctggctggcccctggcagggacactgatgagggtgcttgagttgatcctgtctagtccctttctgtgttttcaaagcccattctaaagcagattcccatttccgtctttgactctaaggcccaagggggcaagctggtctgccgggcccacaacgcttttgggggtgagggtgtctacgccattgccaggtgctgcctgctaccccaggccaactgcagcgtccacacagctccaccagctgaggccagcatggggacccgtgtccactgccaccaacagggccacgtcctcacaggtaggaggctgggcttgccctggggtgaggaggggtctctttctccttatgcacccactgcccgcgaggcttggtcctcacaagtgtgatccatgagactcaagcctgacttgcagttccatactctggttctgccacttccatgccctttgagcctgggcaggtgaccttacttctcctcatctcagcttcctcctccataagagggaaaaaggtattacctgcctcattgtgttgcaaggagatgggcagcatctagggcactggcctggagtatcgcaggtgctttgcctaaggtggtgcagtccaggagaggcagctccagagagaggcccccggctggggctgaaaggagggcagacctcggtttgaatttcaccctgccgctctatagctgtgtgacttgggcaaattacttaacatctctgtatgaggaaatgatgagtgctaagcacttagcttagtgccgggacaatataaattctagctatcgttactattgttttcatcacccgttgctttaaaatccagcctctggtataggcaactattgacgggctaccctgtgtcgaaaacatgcccaggcaggtagcaggaagtcacagatggggacctcttggggcatcaagggatggtgccctgaggctgagctgttctggttgggtggagcatgagaggtctgggaagacagtgggactccagcctggaataagaggctcagagttgattctcgtctgagcacgtccaggggaaccactgagggtttgggaacaggagagtgagggtgagaacctggttctgggcacagcaggctggcatgtaggatggatgttcaggaaagatgagcatagtcaggtggctggtgcccttgtccaggggagaggctccgtcaggttcaggggtcctggcttggagggaagtccgccatgctctaatcacgctcccctttggaagtgctcagccgatgagctcacaggcacatgtcagtttgaagtcatggaatctgactccatgaagcgcacctcaaagagcaccattttgcagctaagggaactgcaggctggacatgctgagtggctgccccgagcccttgcagctaggacatagagaatgctagtaaccacaaccctaccatgttcagagcacatgccaggctccatgctggggcttcgcacgtgtcatcttcacagtgtccctgtgagtaggtgtggtttctctttccatcttacaaatgagtaaacagagcctcagtgtagctaagtaaccactattttaggtttcttagccaatgggtgtgtctgactcctaagcccatggagggcattctgaggtggttcagacagaccccggcttacccttgaacttctgcctgctggctgcatagggaggggctggggggagtttgagcatctcaggccatagagcccctgcctcactgtctccatctctgggtggaaagatggtgttttccctgagaaactaaggctcagagaggttgaatggctctcccaaggtcacacagctggtcagctgcagagttgagaacacaggagtcctggtgctcaggccagcatctctttttttctttgagttgtttctaggtttcctagctcttgcctcagaccttaaagagagagggtctgatggggatgggcactggagacggagcatcccagcatttcacatctgagctggctttcctctgccccaggctgcagctcccactgggaggtggaggaccttggcacccacaagccgcctgtgctgaggccacgaggtcagcccaaccagtgcgtgggccacagggaggccagcatccacgcttcctgctgccatgccccaggtctggaatgcaaagtcaaggagcatggaatcccggcccctcaggagcaggtgaagaggcccgtgaggccgggtgggtggggtgctgcgtgtctctcctgcacagcttttctgtgtcagtttgtgccaccaccataccgccatgcatcagggtggcggtttgccaggtagatgctgtgggcagcttccgccattgtgtggacagcatgtatatgtgtctctgtgtggctgggtctgtttttgcttttgtccagatcagtaaggtttgctacctgggtaccccactccacttggagtagaatgtgcataaatatggcataaagaaatgcaatatgcatgcatttattgattgatctatttttttctgagatggggtcttgctgtgttgcccaggctggtctcaaattcctgggctcaagcaatcctctggtctcagcctccccaagtgttgggattataggcatgagccgctgcacctggcctctctgatctatttaacaaacctgctgggagggtctcagggtcaggagcagcactgggctctgaggacacagagctcactcagccgtgacccagagggggtgcctgagctgcatgctgaaggttgttagcatgaccagcaaggcaagaaaaggccctgccgagattagcaaggcatgtgccaagccctggaatgtgacagccgggccttctagaaacctgagtgtataactctccttaaaagccagtaggagctcctcaaaaggcagccctaaggagtccactcttaaatgaactcagagtcagttttaaaatgcaagtctgtgttgattctggtctggatggtgcattcctcgagagcaaaagacagtcttggtcttggatccacttgccctgggtacactgagggctgctaggttccaggtgctcttcctggcactggggagggatacaggcccaagagacatgctgttctccctcctggagcatctattttagtggaggaagacagaaaacaaaccattaatatagagtactgaaaagatgcgatggagaaaactatagcaaggaagggaatggggtgggagagaggtcaggagaggtctcgctgacaaggtggacgaaacaggccatgaggcagagaacatgttccaggcaaagcaaaggcccccaggtggggatgtgcagggagtaccaggaaaccagagaggtgggaatagttatgagatggggggtgcctcagaggggacagggccaagtcaggtgagacctgagggtcacagtcagcagtgagctggggccatgcaggggtctggcctcagaggagtgtggtctggcctggatctgaacctctcactgtggcctagctgctgagctgagaagagatgacaaggaccttgggcagaagcagggagactggagggaggcggtggagggtccaggcgttggggcggggctcaggctggagtctgaagggagcctgcaggcctggtgggtggatgtgggtgggagagggggaggatggcaccaaggctcgggcccctggacagatggagttgccattaagtgggatggggcaggctatggggccatcagtttcagagggatgagtttggcactggcatggtaggcatctgtctatctccacggccctcaaaccaggcatgaagcaggagctcacgtgtttggtcagccatggtgcagaaccgcctgggtgggaggtgcggggtgggagatacacggttgtgtcccaaatgggctctgagccagcgagggccgtctgcactttggcctcacagaaggatgtcggagggagaaatgaagtgtgggtgggggtcccgggccacgctagacatgtgctttcttttcctcgggctctggcaggtgaccgtggcctgcgaggagggctggaccctgactggctgcagtgccctccctgggacctcccacgtcctgggggcctacgccgtagacaacacgtgtgtagtcaggagccgggacgtcagcactacaggcagcaccagcgaaggggccgtgacagccgttgccatctgctgccggagccggcacctggcgcaggcctcccaggagctccagtgacagccccatcccaggatgggtgtctggggagggtcaagggctggggctgagctttaaaatggttccgacttgtccctctctcagccctccatggcctggcacgaggggatggggatgcttccgcctttccggggctgctggcctggcccttgagtggggcagcctccttgcctggaactcactcactctgggtgcctcctccccaggtggaggtgccaggaagctccctccctcactgtggggcatttcaccattcaaacaggtcgagctgtgctcgggtgctgccagctgctcccaatgtgccgatgtccgtgggcagaatgacttttattgagctcttgttccgtgccaggcattcaatcctcaggtctccaccaaggaggcaggattcttcccatggataggggagggggcggtaggggctgcagggacaaacatcgttggggggtgagtgtgaaaggtgctgatggccctcatctccagctaactgtggagaagcccctgggggctccctgattaatggaggcttagctttctggatggcatctagccagaggctggagacaggtgcgcccctggtggtcacaggctgtgccttggtttcctgagccacctttactctgctctatgccaggctgtgctagcaacacccaaaggtggcctgcggggagccatcacctaggactgactcggcagtgtgcagtggtgcatgcactgtctcagccaacccgctccactacccggcagggtacacattcgcacccctacttcacagaggaagaaacctggaaccagagggggcgtgcctgccaagctcacacagcaggaactgagccagaaacgcagattgggctggctctgaagccaagcctcttcttacttcacccggctgggctcctcatttttacgggtaacagtgaggctgggaaggggaacacagaccaggaagctcggtgagtgatggcagaacgatgcctgcaggcatggaactttttccgttatcacccaggcctgattcactggcctggcggagatgcttctaaggcatggtcgggggagagggccaacaactgtccctccttgagcaccagccccacccaagcaagcagacatttatcttttgggtctgtcctctctgttgcctttttacagccaacttttctagacctgttttgcttttgtaacttgaagatatttattctgggttttgtagcatttttattaatatggtgactttttaaaataaaaacaaacaaacgttgtcctaactcttgcatagacttgactgcctagggtgatgccttgcttatactaggaactgggtaagtttgttgaatagttgagtaagccaagtatttgatgagtacttttatcttgagtacaagtattgggcaagtactggtgatgtgaacttactccttgtgcctatcctaggaatgaaatgaatgtcttcctgcagctcccctgaccaccctgacagtcaaagtgcctcctccttggtgacaggtgccctacagcactctagatgctctgttgtcctgacctcccaatgcccttttcattcttttctccccagtacctggcacacagcctggcccgagtatttacggaataagttacagtgccagatgcttctgtaatgagccagtgctaagtccatggcttttttcatgatttaaaattcagaacagtctcagattgggtgcaatggctcacacctgtaatctcagtactttgggaggctgaggcaggaggattgcttgtgtttaggaattcaagaccctgggcaacagtgagaccccgtctctataaaaaaatttaaaagattagcgaggtgtggtagcacatgcctgtggtcccggctactcaggaggctgatatgggaggcttgcttgagctgggaggctgagggtgcagtgagctgtaattacatcatcactgcactgcagcctgggttacagagtgcataatgatcccattcaatgtgggacctccaggccctccactctaaggctggtgaatatagctgtcttaagcaagttctctctctctctagacagcccatgtcataaggaatctcaggcaaaattcctcccagattacattttctgacaattcagtgtcatatatggaaagcattcaagagttgacagatggcaatggcttgaacacccaactgtgttatctctgcccgttggaacctaggcctgtggtgcaaccctagactctctctccttcccctccacagaatcaagtatcagctggttagagatccacaccctgacagctctgtgatgttggaacaacttggttcttgcagagggttagcaggtggtcaccagggatcggggaggaaggggtgtggcttgcaggaaggcgaaaatctggactagcaaatagggaaggggacccatgtgagcaacgctggccactaggaatgagactgagacctgtgggatctagcaagaagcccagtgtgaccagcgacacgatctatgctggggaccacttgggagagccaaaagctttggtggagatgaatggagaccatcaacctaagttcagcatcctcctctaagctttgcagatgaatcctgaaatggtcagcccctccagagaaaagaacagcaacaggctcagaggacccacagtcccctttattagtgtaaagtactaagaggaatcaacagcatttagcaccaggcacaggctcgtgttcccccgcccactacggctgtgttctgatatatgaagaatggcggcaagactccaactctgtttttgaaaaatttattttatactcttagaagctaagaactttgcc

SEQ ID NO: 1547 - DNA, 544 bp, Homo sapiens
  source 1..544: mol_type = other DNA
aatctgacgctgtttggggagggcgaggccgaaacctgatcctccagtccgggggttccgttaatgtttaatcagataggatcgtccgatggggctctggtggcgtgatctgcgcgccccaggcgtcaagcacccacaccctagaaggtttccgcagcgacgtcgaggcgctcatggttgcaggcgggcgccgccgttcagttcagggtctgagcctggaggagtgagccaggcagtgagactggctcgggcgggccgggacgcgtcgttgcagcagcggctcccagctcccagccaggattccgcgcgccccttcacgcgccctgctcctgaacttcagctcctgcacagtcctccccaccgcaaggctcaaggcgccgccggcgtggaccgcgcacggcctctaggtctcctcgccaggacagcaacctctcccctggccctcatgggcaccgtcagctccaggcggtcctggtggccgctgccactgctgctgctgctgctgctgctcctgggtcccgcgggcgcccgtgcgcaggaggac

SEQ ID NO: 1548 - DNA, 544 bp, Homo sapiens
  misc_feature 371: note = n is a, c, g, or t
  source 1..544: mol_type = other DNA
gagcacggtggagagcggggacggccggctctttggggacttgctggggcgtgcggctgcgctattcagtgggaaggttcgcggggttgggagacccggaggccgaggaagggcgagcagagcactgccaggatatcctgcccagatttcccagtttctgcctcgccgcggcacaggatccgtggaggttgcctggcacctacgtggtggtgctgaaggaggagacccacctctcgcagtcagagcgcactgcccgccgcctgcaggcccaggctgcccgccggggatacctcaccaagatcctgcatgtcttccatggccttcttcctggcttcctggtgaagatgagtggcgacctgctggagctggcncttgaagttgccccatgtcgactacatcgaggaggactcctctgtctttgcccagagcatcccgtggaacctggagcggattacccctccacggtaccgggcggatgaataccagccccccgacggaggcagcctggtgggaggtgtatctcctagacaccagcatacagagt

SEQ ID NO: 1549 - DNA, 580 bp, Homo sapiens
  source 1..580: mol_type = other DNA
agtggggagcacggtggagagcggggacggccggctctttggggacttgctggggcgtgcggctgcgctattcagtgggaaggttcgcggggttgggagacccggaggccgaggaagggcgagcagagcactgccaggatatcctgcccagatttcccagtttctgcctcgccgcggcacagacggaggcagcctggtggaggtgtatctcctagacaccagcatacagagtgaccaccgggaaatcgagggcagggtcatggtcaccgacttcgagaatgtgcccgaggaggacgggacccgcttccacagacaggccagcaagtgtgacagtcatggcacccacctggcaggggtggtcagcggccgggatgccggcgtggccaagggtgccagcatgcgcagcctgcgcgtgctcaactgccaagggaagggcacggttagcggcaccctcataggcctggagtttattcggaaaagccagctggtccagcctgtggggccactggtggtgctgctgcccctggcgggtgggtacagccgcgtcctcaacgccgcctgccagcgcctggcgagggct

SEQ ID NO: 1550 - DNA, 2976 bp, Homo sapiens
  source 1..2976: mol_type = other DNA
agtggggagcacggtggagagcggggacggccggctctttggggacttgctggggcgtgcggctgcgctattcagtgggaaggttcgcggggttgggagacccggaggccgaggaagggcgagcagagcactgccaggatatcctgcccagatttcccagtttctgcctcgccgcggcacagacggaggcagcctggtggaggtgtatctcctagacaccagcatacagagtgaccaccgggaaatcgagggcagggtcatggtcaccgacttcgagaatgtgcccgaggaggacgggacccgcttccacagacaggccagcaagtgtgacagtcatggcacccacctggcaggggtggtcagcggccgggatgccggcgtggccaagggtgccagcatgcgcagcctgcgcgtgctcaactgccaagggaagggcacggttagcggcaccctcataggcctggagtttattcggaaaagccagctggtccagcctgtggggccactggtggtgctgctgcccctggcgggtgggtacagccgcgtcctcaacgccgcctgccagcgcctggcgagggctggggtcgtgctggtcaccgctgccggcaacttccgggacgatgcctgcctctactccccagcctcagctcccgaggtcatcacagttggggccaccaatgcccaagaccagccggtgaccctggggactttggggaccaactttggccgctgtgtggacctctttgccccaggggaggacatcattggtgcctccagcgactgcagcacctgctttgtgtcacagagtgggacatcacaggctgctgcccacgtggctggcattgcagccatgatgctgtctgccgagccggagctcaccctggccgagttgaggcagagactgatccacttctctgccaaagatgtcatcaatgaggcctggttccctgaggaccagcgggttggcagctgttttgcaggactgtatggtcagcacactcggggcctacacggatggccacagccgtcgcccgctgcgccccagatgaggagctgctgagctgctccagtttctccaggagtgggaagcggcggggcgagcgcatggaggcccaagggggcaagctggtctgccgggcccacaacgcttttgggggtgagggtgtctacgccattgccaggtgctgcctgctaccccaggccaactgcagcgtccacacagctccaccagctgaggccagcatggggacccgtgtccactgccaccaacagggccacgtcctcacaggctgcagctcccactgggaggtggaggaccttggcacccacaagccgcctgtgctgaggccacgaggtcagcccaaccagtgcgtgggccacagggaggccagcatccacgcttcctgctgccatgccccaggtctggaatgcaaagtcaaggagcatggaatcccggcccctcaggagcaggtgaccgtggcctgcgaggagggctggaccctgactggctgcagtgccctccctgggacctcccacgtcctgggggcctacgccgtagacaacacgtgtgtagtcaggagccgggacgtcagcactacaggcagcaccagcgaaggggccgtgacagccgttgccatctgctgccggagccggcacctggcgcaggcctcccaggagctccagtgacagccccatcccaggatgggtgtctggggagggtcaagggctggggctgagctttaaaatggttccgacttgtccctctctcagccctccatggcctggcacgaggggatggggatgcttccgcctttccggggctgctggcctggcccttgagtggggcagcctccttgcctggaactcactcactctgggtgcctcctccccaggtggaggtgccaggaagctccctccctcactgtggggcatttcaccattcaaacaggtcgagctgtgctcgggtgctgccagctgctcccaatgtgccgatgtccgtgggcagaatgacttttattgagctcttgttccgtgccaggcattcaatcctcaggtctccaccaaggaggcaggattcttcccatggataggggagggggcggtaggggctgcagggacaaacatcgttggggggtgagtgtgaaaggtgctgatggccctcatctccagctaactgtggagaagcccctgggggctccctgattaatggaggcttagctttctggatggcatctagccagaggctggagacaggtgcgcccctggtggtcacaggctgtgccttggtttcctgagccacctttactctgctctatgccaggctgtgctagcaacacccaaaggtggcctgcggggagccatcacctaggactgactcggcagtgtgcagtggtgcatgcactgtctcagccaacccgctccactacccggcagggtacacattcgcacccctacttcacagaggaagaaacctggaaccagagggggcgtgcctgccaagctcacacagcaggaactgagccagaaacgcagattgggctggctctgaagccaagcctcttcttacttcacccggctgggctcctcatttttacgggtaacagtgaggctgggaaggggaacacagaccaggaagctcggtgagtgatggcagaacgatgcctgcaggcatggaactttttccgttatcacccaggcctgattcactggcctggcggagatgcttctaaggcatggtcgggggagagggccaacaactgtccctccttgagcaccagccccacccaagcaagcagacatttatcttttgggtctgtcctctctgttgcctttttacagccaacttttctagacctgttttgcttttgtaacttgaagatatttattctgggttttgtagcatttttattaatatggtgactttttaaaataaaaacaaacaaacgttgtcctaacaaaaaaaaaaaaaaaaaaaaa

1-66. (canceled)

67. A compound or a pharmaceutically acceptable salt thereof, comprising a modified oligonucleotide 12 to 30 linked nucleosides in length having a nucleobase sequence comprising at least 12 contiguous nucleobases of the nucleobase sequence of SEQ ID NO: 1016.

68. The compound of claim 67, wherein at least one of the nucleosides of the modified oligonucleotide comprises a cEt sugar.

69. The compound of claim 67, wherein the modified oligonucleotide comprises
a gap segment consisting of ten linked deoxynucleosides;
a 5′ wing segment consisting of three linked nucleosides; and
a 3′ wing segment consisting of three linked nucleosides;
wherein the gap segment is positioned between the 5′ wing segment and the 3′ wing segment; wherein the 5′ wing segment and the 3′ wing segment comprise cEt sugars; wherein each internucleoside linkage is a phosphorothioate linkage; and wherein each cytosine is a 5-methylcytosine.

70. The compound of claim 67, further comprising a conjugate group and a conjugate linker.

71. The compound of claim 71, wherein the conjugate group is attached to the modified oligonucleotide at the 5′-end of the modified oligonucleotide.

72. The compound of claim 71, wherein the conjugate group is attached to the modified oligonucleotide at the 3′-end of the modified oligonucleotide.

73. The compound of claim 72, wherein the conjugate group is 5′-Trishexylamino-(THA)-C6GalNAC3.

74. The compound of claim 67, wherein the pharmaceutically acceptable salt is a sodium salt.

75. The compound of claim 67, wherein the pharmaceutically acceptable salt is a potassium salt.

76. A pharmaceutical composition comprising the compound of claim 67, and a pharmaceutically acceptable diluent or carrier.

77. A pharmaceutical composition comprising the sodium salt of claim 74, and a pharmaceutically acceptable diluent or carrier.

78. A pharmaceutical composition comprising the potassium salt of claim 75, and a pharmaceutically acceptable diluent or carrier.

79. A method of treating, preventing, or ameliorating a disease associated with PCSK9 in an individual comprising administering to the individual a compound of claim 67.

80. The method of claim 79, wherein the disease is selected from hypercholesterolemia, dyslipidemia or mixed dyslipidemia.

81. The method of claim 79, wherein administering the compound inhibits or reduces LDL-cholesterol levels and total cholesterol levels and improves the induction of hepatic LDL receptor levels.

82. A method of inhibiting expression of PCSK9 in a cell comprising contacting the cell with a compound of claim 67.

83. The method of claim 82, wherein the cell is in the liver of an individual.

84. The method of claim 83, wherein the individual has, or is at risk of having, hypercholesterolemia, dyslipidemia, or mixed dyslipidemia.

85. A method of reducing or inhibiting LDL-cholesterol levels and total cholesterol levels in an individual having, or at risk of having, a disease associated with PCSK9 comprising administering a compound of claim 67.

86. The method of claim 85, wherein the individual has, or is at risk of having, hypercholesterolemia, dyslipidemia, or mixed dyslipidemia.
